United States Patent Application Publication US 2026/0058010 A1 - sequence listing, part 14

SEQ ID NO: 151 - DNA, 218033 bp, Homo sapiens
  source 1..218033: mol_type = genomic DNA
aacaagaaaaagggtcttaagaatggagacttggccgggcgtggtggctcatgcctgtaatcccagcactttgggaagctgaggcaggtgggtcacctgaggtcaggaattcgagaccagcctggccaaggtggtgaaaccccgtctctactaaaaatacaaaaattagctgggcacagtggcgcatgcctgtaatccaagctactcaggagaggcaggagaatcgcttgaacctaggaggcagagcttgcagttaaccgagactgtgccattgcactccagcctggacaacaacagcaaaactctgtccccagcccctggccaaaaaaaaaaaaaaaaaaaaaaaaaaaaaaaagaatggagacttcttgtcttagaaaaagcactttttgagatattattgtggaggatggtcacttgtgtgtttccacctccactgagaacaacaaaataaatggtggtcttaaggcagtgttttctaatctatagatgttgacaaataaaggactctatggttctttactaggagttctcagagactctctatgtacttcccagaagagatttagcacttgaccacagaactcttttttcacggaacatttgatggatgctagtgttttgggagacacattttaggaaattatggtttcagatatgctgtggggactcagactggacatttgaaataatttcctgattgattactgttagagcccggagctggcggccaaggaagactgtgaagtttccttccttggaaggttggtagactcttcctccttcccccaactcccgctcttttaatattagcattagacatgcacctgcctgggagtgttgaggtgtaggcctgacatataggggatctgagcatctagatccttcccatccccatgattctatttttatggatcccaattgtggtagtgttgcacggaaggcacagactagctgggacaggaggtaactgagagttttggccaagagaagagggggctagagatgggaaaagttgatgcaattatttttggcaggagttggaaccaaagcagcagaagagagtaagttttaagactctctggcaaagtaacttcctaatctgtcactgagtatgtgtaaaaaagtgattagtgggtctctatatttatcatgattactcacaaatatgtaatttacataatatatacagcacattaagtactatgtcaccttatataatgtgcatatgtataatgtatatgcatgttatgtaacgccagtctggaggctcttccaggttctgccaagtatttcctaatttatttggcaattttaacgtatcttttccatctgtggaaagaactctcttgagaggagctggtctctgacctgaatataatcatcctactaggtctatctccactctcaactcactggggaaaacccacaaagactaagccataatgagacacaattcctagcccatcagtttagggacaacacaatgtactagagagttcctgctttacagtttttattgctgttggggtagaagcatggggggcaggtgagaacatgtttgtagcatggccagaatcagaataagataagaaataagggattaggttctcccctgactaaccatgtggctttgagaagtcactaaacctcattaagccttgttctcctcattgagatcgagataataataccttctctgctaacctcagaggttgctatgagggtcactatgatgagggactccaccacaagaaaccacagtcatagtgtttaaaggatgatttgcaaggcacgattaaacaacaacacaagatttactaaggttaccaaactggaagtgcaattccactgaagttgttatactccatgcctctaagaaggacttgggatatgtctctcaagcaacattgcaagtcctgtgcactagggtgcagcaggtaagggccattttctgcactgccccttcatgagacctgtgagtctctgagaatcaatttcacctgttgatagtgccatgtctcaatagcctcaatcttggggatcatggctgaaacacatgcacgaacttctgtaaatgtcttagaatcagtgaccccaaacctgaacctgcctcagtttcagaaacaagtggcttccaagatagtacctgtagtaattctggagcttgttggtcccatcaccaagaataccatcattaaagatattcttcaggtggcctggttttccccttacttagcattctgcactgttaggttgagcagaatggtccaagatcttgctcctaggtggtccttcacagttaagtgccatttgtacacacaatcttaatattcccttctttgtccaaagctcctgtccaatgcaagattagaggcagctcagtggaacgatatcaagtgggtccaagtttccactgataaatctcagagagggatggaggcccaatgaagctctgcatggccttgcccttgggaaaggatggtaatgctggcacttgctgaatgaagcccactgagctctgctgagacccctctgtcctggctggcagtatcttgcagaagacgcctcagtccttcttgtgactctccactgaggtcatccctgcagccaaggttgtttccaaactaagagactatgatgaccatgatgaggtgacatgtggagagttcagtctgatgatctgtttagtaccttcgatctcagaccaacttcttttccattcaggtcagagagaacctctgggaagcagcatgaggcgctcgttttcttgtgtggggatatcccatccacgcatgtgctgtacgtttgttcctccctggcaacctggatccaagtggactcacttttcagtgaccagaaatgaccctactctgagatgtgtgggttcttttctccattaaatatctttgtaacggcacctactctcaagctgcattagccaagacaccatggaaaagtctctgaacttttctgagactcaattttcttatctgacaaatgggagagtaaatccagcccagcaggtctttcatgcttgttttgaggatccagaataggagttctcggtctcttcgttcataatagggagctactttcattccccttaacccttgtgatcaccacagggagatgcgtcctgacaatgaaacggtggagtgggggagtgagaaccttctttttccttaccactttctgtctcatactacctatgttttttttttccaatgaggaaaagtccatcagtaaataaatatttatatatatatatatataaatatataggctaaatatatatatatacacgcacacacacacacacacgcgcgcacacacgttaagaccatcagaaggtccttcaggtcatactctgggagtggtgagtgcaaagaagcaggagggaaccgtctcctggtttccccagcaaagttccttccttcccatcttttctgccttcaggaatagtctgccaccagggcttggaactcaaacaggaaacacgctttggcttgaaaaagaaagaagctgggggtggttttttttttccttccctttttacacaatattatgacaccaatttgaaaaataaatcccagtttctccgctctccctcccaggtgttcacagaactaagaaaataaataccacatctaaggtgtgctatgcaggcagctctgggggctcttggagccgcctctaagcaaacatgtagacaccaggagaaggttcctggaaaataacaagtgcccaccgacggcgcagaaacccaagaatggaaatacagctttccacagcctttctgcctcttcagcaggttcacggagaagttgtcactcaaaggacgaccaagaaaccaacgtgcgcctgctgagccctgccaaggattatgctctgagagccggaggccgttttgtctctgtacagagggaactttgtgcaaattctctggaaccagagctccttcccttggccacatctgatctcaccataggcaggaaacctgcagcctgctcctcgcgagcgtccatgaggaaacttgcagggctggtagaaagaaagggggatttcccttcagtctcagaaaattctgctcaaggcctgtgggaatgtggaggttgctgcctaagccagccacaacctcatgggccctaagtccattcaaaatgttttgttggcactggctctgttaggggtgtacccactgttgaaacagaatgtatggcaaggtgacgttttcttcccgaagggtggctttgcttccactggttagagaagagtgtgtatgtgtgtgtgtgtgtgcatgtgtgagtgtgcacataaattgtgtgtgagtgtgcattatagtttcttgctttctctcttggtttagctggtgtttggcacactgtttagtcttttgaacggctcttccttctcaacgagaagaagctgctcttctggggaggccccatcatcatgggcgcttggttcttgtgagtaattttaatctaaaagcaaagaggcagaaatgaattagtggcatgcaaatctcagtagcctaagggagagtgagtcgcagagaaaggaaaggccagcttcaggatggaaggagccccatgcagaaggacaactgtccttgaacggcttcaaaattggcaacttgaccctgactgggcctggagtttggcacggctggaagtgaggggcggaagcactggggagagacaggtgtgagcttcccacgtggtgatcagctcacacctgtcttgtgttcttggtattcacagactctcagaatgtcacagccagaggagacctcagggactcaatcgacccctctgcaggagcccattagagtagcctaagttcacaaacagagcagcagcacaattagagcccagttcttcagattcccagcctccattgctcctggtcattcctgccaaggcagtgctgagatgtcaatcaagtgaccgaggctttggtctgacctctgaccaagcaccattatgtggagagttcccaattgagtgccttatgtatttcctcttttcttggccttcgagggaagaccccaaattctttttaaaacttttttttctttaaattttagggtttataagtgtttcctcctgtaaactttaagtcaatcagaagtgaaagacactgatgtattctcatttttgcctttattcccaaccttatcctcaggtcatggctttgaaatagttaattcctacctgagtgtggccttgccaccttaataatctacattatccatccacaatatttattaagtatgataatgctcagagtaggacgatgaagtgggaacaggaagcaattagaattcaaagacctgggtttgagtccagacacttccacttctttgctgtgaacatttagatgaatcattgactcttcagagccagtgcttactgaactgtaaatgaggaggataacatttgtcttattttcctcacaaagatcaaagaatagattgtcaatgaaagcccactgtaaactgtaaaatggaaagtaacagttagtaaaatccttgtcttatggagaaagagaaggagaaagatggatgtcaaaagaaacagaacctatgaactcattcttgtggtttttaccacattataggaaatgacagtgtgaccgcagggaacaacagaactcttgaacacagaaccatcaacgagtttaaatcaatgtcggctaaaccaagtggtgtccaaaacaaggtgggcatggaatgagaaaagtctgatgggaacaaggaggaaagaattttaaaatctgaaggaaggaaaggaaatgtgttgatgaaaagggagtgggtagagaagtcacagatgagcaggttgagttcagggcaaactatgagaaatgtggtcatggacacaggtggggcagctggtgtggggttttaaagggaggcagaaagactgggttcacatgaagaaatgaggaagcatgagagatggcattctgtgctggagaataacatgacacaaaagaaaagagtttgagggaaattatttaacagctgttgtcaaggtgagctggggtagtgagtgcctggctaagagggcactactgtaagccaggtttacattgaaagggctccaggaactgtaatcccagcacttcgggaggctgagatgggcggatcacttgagcccaggagtttgagaccagcctggccaacatggtgaaaccccgtttgtactaaaaatacagaaattagttggaggtggtggcaggcacctgtaatcccagctacgtgggaggctgaggtaggagaatcacttgaacccgggaggcggaggttgtggtgagccaagattgcaccactgcactccagcctgtgcgacagagagagactccatctcaaaaaaataaaataaaaataaagggctccaggaaatggaagggaaggatagaaccagaagacactgtggacaattagcataacctggtgctaaaagctgaaaatgatccttatgttggcttccaccagcccagagacctaaaaggggagagagtctctgttttttgatagtcaccagaggagaaaaccgagaatgcatcaacatcattttgtgctgtgtgtcttattgtgggcattatgtttatcccaggacgcacggaagcgaggcataggctggagactggagactcggacagcacttatctgtggcatgcaatgtagcattctttgttcccctgtggaacacgtttgtggcatgttcccctgtggtcagccttctctcactcctgatctcccatgcccatgaggggaaggacttcagcttattcaccacggcactctctgagccagtgcagtgcctgttcagggtacaacacactgtggaagtactgactgataagccctacgtgctggcagtggagatggctctgttggaagcagaggatggtagctggtgcctacatttcccgctggtagagcccctcccccacatttttttatttttgagacagagtctcgctctatcacccaggctggagtgcagtgatgcaatctcggctcactgcaacctccacctcccaggttcaagcgattcttctgcctcagcctcctgagtagctgggactacaggtgcttatcaccatgcctggctaatttttttatttttagtagagacggggtttcaccatgttggccaggatggtctcgatctcctgacctcatgatccgcccgtgtcggcctcccaaagtgctgggattacaggcaccagctgccgcgcccggccttttttttttttttttttttatttagatgacacaagacccttgcttctcttttttatccctttagctgagctatttatttgctagttagtacctccagggcacggaagaggaagtaaaactcaaatctctcctgcttgtttttcagcggttctgacaaaggtcttgacagggtaggagtctggggctcctgggtaacataatattttggtcagctttgtggattctattactatagaaccgaaagaagtatgaaatcatatcctcatttccagtcaaagagatatcagtcccttaccctcaaattaggggctagcaggtaaaatagttatgatcctattttaggaggtagttggatgtggctaagcctgccttttcaaaccctgatagaaagaggtcatcccacgtttctgtagttagcacccaagcttctttggtaattgggcgagtcaggccattaactaaagtctccatgattttcttaaaaactattcacatcactgacagcacctggccaagtgctaagatcagcagcttagtgcatagttttctgtttgatcacagagagaattgatacactagactcttgcatgatagttcgaagttcacaaaactattacagcatgtaatttcccctttaaaatagaataaaaatgtgaacttcactagtgctggggattgactttgttgggggctgttttctgcaaaccaacacattcttattacttcaagagaagcaagagattgagggacttcttcctgaatgttgccttctcagggtgtgtaattcagataatgcctagtaaaatggccaataacctgaagtgtgaacccttcccaaaccatttgaaaggtgtctgaggggccaggcgcggtggctcacgcctgtaatcccagcactttgagaagcccagaggggcagatcgcatgagcgcaggagttcaagaccagcctggggaacatggtgaaacttcgtctctacaaaaaatacaaaaattagctagacgtggaggcgcgcccttagctacttggaaggctgaggtgagaggatcgcttgagcctgggaggtcgaggcggcagtgagccgtgttctcgccactgtactccagcctgggtgacaaagtgagaccttgtctcaacaacaacaaaacaacaaaaaagaaaagtgtctgaggtctgctgtaatttgaactggagatgcatagaaaggcacaaatctggaaggtctcaaatagtctctgcgatattttaaaagttaaagaaatatggtgagcctaagggaggaggaaggtttgcatggctttccggtcttagttgtttccgggctctccaagatcctagaatgtgctgcttcctgacagtgtttcctgccatcagaggccttcgaatgtaaatggacaaggccaggcgcagtggctcacacctgtaatcctggcactttgggaggccgaggtggggcagatcacctgaggtcaggagtttgagaccagcctcgccaacatggtgaaatcccgtctctactaaaaaatacaaaaattagccaggtgtggtagtgggcgcctggaattccagctacttgggaggccaaggcaggagaatcacttgaacctgggaggcacaggttgcagtgagccgagatcgtgccattgcactccagcctagacaacagagcgagactctgtctcaaaaaaaaaaaaaaaaaaagaaaagaaaaagaaaaaaaaaagaatgtaactggacaatcaggttttgcagagggtggggaagaagtgtgggatttattgatgagttgggaagttcaactacgtcattagttctcaaagtgtggctcataggccagcagcatcagcatcaccttggaacttgttagaaatgaaaactctctggcatccagacttactgaaccagaaaatctgggatgtggcccagcaatctgtgtttcagaacccctgtaggttatgtagatgcatactcaagtctgagaatcaccagactagataagtaggatcatctttgactttgagattctgctatcgtctaactctgggagaagattctgaattttgaggctcagattatgccacctaactgtgatggtgaagcacgagagatcatcttacagtgtaataataatgagacaagtttcccgaataaatatatatatatgtttgtatatacatatataaacaaatatgggcttctgtttttgttttattttggttttgttttgtttttgtttttgtttggttttgagatggagtctcgcactgtcgcctgggctggagtgcaacggcgtgatctcggctcactgcaacctccgcctcccgggttcaagtgattctcccgcctcagtctcctgaatagctgggattacaggcacccaccaccatgctcggctaattttttatattttcagtacagacgaggtttcactatgttggccaggctggtcttgaactcctgacctcgtgatctgcctgcctcagcctcccaaagtgctgggattacaggcatgagccactgtgcccagctgaaacctttccctaaatgttgggcattttaaggaaatttttaggaaatttccaactttttgcaatgataagtaatgtagacgtgacattcttatatatcaatctctctgtatttctggtaatctgtattttacttagaataaattcctagaagtatatgaacaatttttaaaagtgaaagtaaatgaactagatcaacgtatattaatatttataacagttcttgacacatgggtctacatgcttttcagaatggctgtaactgttgatactcttgcctcactgtatgagtgtcctggtctccccatacccttgacagcaatgaatataaagacaaaacagctgtgctaattggtcagtgaaacatggcatgcctttctcactgttttaatttgaaaatcttttcttccttttttaaaaacttgtgatattaaatattatttcatagatttattagcccatgacacttcttctatgaattctctgttcactattgcattgttagtattttttttttccgctggattctaatagctggtttctttataccttgtgagaattaacctgatctttgggatagcgattgcaaacatcttgtccttagtctttcgaagattctatattgatttttgacttgtagaaattaaaattggttaacagtcaaatatgtccctttttccttagaaaatccctgcccccagtgtaattatgatcatctattttttttctggtagctaagaacatttaatactgtaattgaactggggggcttttttttgctttggttttgtttttggaatatagtttgaggtgagaggttctatataaagacattttctgaaacgcaatttcttggatatcatatgctaaacagttcatgcctacctaattagtttataatctttctctttccttcattagtttttatgtatactagggtttctcaaggcttgcttctgtactattgatttatctatccattatcatgccaatagcatgttattcaaattattgtggctttataattattttaatatcttgcgagaagttatttctcagcgttcttttataaaacatcctagaaattgcattgtttgtagagttaaagaaacaattgcattgggattttgggatccctgttcaggaacatgggatgttctgtgttcaaatcctttttttttttctttattggttaaatcttatagtcatcttcatgcattttacacagttcagtttagtattttatgtcttttattgcttatataatgatattttaagctttaattatatcctttgaattgattattgctggtatactattaatattaatgccggaaaacttaatatttgtccattttttctatagggttttattgaagtaatttatcctttgaggttttcagtttattctattagctttttatgttcataatcataccacctacaaataatgacagttttgactcttttccaaataattatatttctttttctaattatattttctaattacatttcttttctgcttcaagtatatattgcattggctaaaatttccaatgttaaaaatacatgtcttgttcatgattttagtgagaattcctctagtgttttactattaagtaaaatattggttatggtttaacatatatttaacaaaggtattcattagtaggggagaagctttctgatcttagttttcaggagtttttatctttaaaaatcagaaatgttgaatgtaattgaatacttttgggtcatctattttatcatgtagtttttctatttaaactaatagtagaagactttcctttgttcctttaatatgctcataggggtgaatgattcttttaatacattgttcaattctacctaccaatacttttaactagaattcttatgtcatatttatatatagtctatagtctatagtcttctatttttaaatgtaatttttgttaggttattgcatgtcttcatttcataaaatggattgagtagccttccatctttgtctgtactatgaaacagttcacctaaatacgtatttcctagtagtatggaagatctcaccaataaggccatctgttttaagatcatttagtatgtaattctttgaaataatttagtttcattaatggttaccaggattttcattcatcttcttaagatgttcaagttcattagaatcaagatgattgtatattttgttttacaattttttttcttttgagacagagtctcactccatcgcccaggctggagtgcagtagtgtgatcttggctcactgcaacctctgcctctgagttcaagcgattctcatgcctcagcctcccgaggagctggaattacaggcatgggccaccatgcctggctaatttttgtatttttggtacagatggggtttagccatgctggtcaggctggtctcaaactcctgacctcaagtaatcctcgtgcctcagcctcccaaagtgctgggattataagcatgagccaccacgcccggccttgttttatatttaaataaagccacggacacagttatatttatatttttatattacatttatattttttaccttttaatatgtttgattcctttctcttttaaaaattaggttttcaaacatttgacatattttaagaactagttctagagtttcctgtttttagttattttcttcttttatctttattattttcttccttctgcttctcctaagattgttttattattgctcttctaattttagtattattcattacattttacttcttttttatatgatggaagattatgaggcttttaatttacttccaaatatagtttaggctatattctataatttttaaactggagccttcttatttttgtaattttttgagtaatctaccatggtggctttgatctcctcataaatctcttgttgtttaggagaatttttaagtctccaagtgactaaattttgtttattcacttaatcttctattagtaatttctagctttattactttgtggtcaaagaaaatgacctttataatttctgcaactggattttatggagctttttgccttgtaaactagtttatgatctagtttaataaatatgaatgcctgaacaaatatgatatttaatttctttatgagttatagagttatttcatccaagcatttatttttttgctacttaacctcaaagatggaaacaaatattttcaagcttctcaatatctgtctgtcaattctatatcaaccttttctcagaatatgtattgatagttttttatatattttgattctgttattaaatatctaacattttatgaccactatatctcataattgaatgtactttttatcaaataaaaaatgtgtttacttattctgctttatgctttaggcacatggaaaggttagtttgcctaaaattagcataattaacattactatgtcttccttttaatttctttatacctgataaaggataaaataagatatatattatatatacgtatgtataacctttcattttagatgtatcttttgtaagaagcatatatttggattttcatttttaactcaatatgagagtattgatcttttaatagggaattttaactcatctatttttcttttatatatatattatatatatacagtcttaacatcattcaacttgcttcaaaaaatttttaaatgttggcttattttttgctttctatcctgtgctacattaatagggtttatatattttaaattcttccagatttgaaaggtgtgcaccctatttttagtttcgctagtgattgtctacctattaaaattatcttctgatttatacgttttgtcatcaaagtgaagagagacaatgagaaacttcacatatctttactattccttcagcagtgtctcctgcatgtttttggcctttgttaatataatctcaggtttgggatacaggttattaatatttacatgatatgtcttctctttcaaagaatgattttttgccatttgcatttattgcataaacatatttagcaggtttttggaaacttcattctaatttcactggtttccatttttaccaaaagttcttttgggctgtgatagtccattcttaaggctttaattttgaatcacttcttagttggtgtataccttcaagaagatgtttcaacaaggggtacatgggttttaacccttgcaagtttaagaatgattttctgttaccttctgttatggaataaattgtgtcccccccaaattcatatgttgaattcctaacccccagtgtgactatatttgtaggtagggcctttaaggaggtaataacggataaatgaggtcacaaggggcgggggggccataatcccttagaactggtgtccttataagaagagaaaagagtgtacaaacacagaggaaaagccatgtgaggatacaacaagaaggcagccgttggaagttaggaagagaggcctccccagaaaccagcccttccggcaccttggtcttgtgttgtcagcctccagaactgtgagaaaataaatttctgttgtttaagctgtcagtctgtggtattctattatggcactcaaagcagacgaatatacctttacatacggatttctgggcctcacactatgaaatcattggttcacaaattttttcatagtgagttgtaatctctaaagggtggtatggaggaagggtgggtgtgggcatagggagaagcatttggctatttcaaaatccagtgcttgaatttataggaatagcaatccagttttcagctaggactgaaccaggtaggagagggtttgatttcttccacctttttttttgtaggggggttggagataaaaggaacttggatagattcttctcaactcagttccatcaaatgataaatagtagaaattccctctatgcgtcctaactccagcaaggtggaaagctattatttgatatagtgtgttttcatttttttcttggtcttcataagattgaggtaagatttttgcagagaaatttctgtttttgataacctttatagaagatgctaccttttctcagcaggttcatggaaaccttcctttagtagaagacaatttgatgttctggagggctcaaaatagcaggtgatcaaagtatctgaatactccactagagtgaggaagcttagaaactccacttttgtcttttgaaatttgcatagctgcaatcttattgagggtattacgcatgtagtatcccagcagaggccctgaaaaccaggacgacgattgctcttcaccacgagattctagctgcatttctaactgaggacaaactaagaaggaaggatgcatggctcctgtcctagtgctaaagggagagctaacggatatggtaagtctgggaatggagatagtctatttttgttagttcatttgttcagtcttttattcatcatttgacatgtattattgtgcaactattacaaaccaggcactgttctacgttctgggtgacagtgccataaacaaaatagataacctgcgtggtgactcattcagtggaattttcaagtaggttatcagggctttgggtgcaccgactgggaggcatgtctgtgctctgcgaggaattttctcccgggagctccagcagtcaaaggcgctaccctaccaaattctaggtaaggtaagtgtgtagatttggcttccacgtaaggaagcaatttgacttgttcatcagcagaacagtcttccttttgaggtagtaaattccttgccattgacatgattcaagctgaggctgtccaggatacagtagatgaagtctcagaattcactgactagaactgtgaactcctcgaagttggttctatgtctcattcaattttgtgaccggcgcttcacagtgtctggcatatagcaggttttcattaagagttgccaggtaaatgagtggatggataataaagtggaagaggggttgcactagataatcttccacagtccctgtgactctgagattcagtgatttcatattaagtcagtgcccaaaagggctcaaaaataaggcttctcatccccatctcaaagattggcaagactcaccgtgcaacatggctgcatccagggttctccatccacttgcattggcagcagcttgtttgtcctggaacccagaacaccaagagaacacagtgagctttttcaagtgggagaatcaaggttattcccaccaggaaaacagaagtaggaaaaccttatctgcctacctaagtgtggttctctaagactcttttggagaacttgttaaaaatagatttctgagaccacctcagggagtctaacttggcaggtctgggggccaggcccagtggtctgtgtttctgtgtctgtgtgtgtgtgtgtgtgtgttttgagatggagttccgctcttgttgcccaggctggagtgcaatggcatgatcttggctcactgcaacctctgcctcccggattcaagcaattctccttcctcagcctcccgagtagatgggattacaggcatgtgccaccacacccagttaattttttgtatttttagtagagacggggtttctccatgttggtcaagctggtctcaaactcccgacctcaggtgatccgcctgccttggcctcccaaagtgctgggattacaggcatgagccactgcgctcggccgggtctgtgttttaataagcactacaggggattctactgcctcggtcctcagaccccactttgagaaatactgctgtggatgagcagtgaagtccacagaagtctgggatacagtggccagtgagcgtggcagcgccaccactgagcaggtgctcctcaaacagtcagctagaaggcccagagtacgtgccaaaaactccactctgaaaggggaattggcctggtctctatgttgagtgagaggttgcatcatgtcaatgaggtaatgtctccaatttatacaacatacagctcaggtctgagtgtgtcttgccttgcaatctattctaacctcagtcctggtttttgttttgttttgtttttgagacagagtcttgctctgcgcccaggctggagtgcagtggcaccatctcggctcactgcaagctctgcctcctaggttcacaccattctcctgcctcagcctcccgagtaactgggactataggtgcctgccaccatgtccagctaatttttttttgtatttttagtagagacagggtttcaccatgttggccaggatggtctcgatctcctgacctcgtgatctgcctgccttggcctcccaaagtgctgggattacaggcgtgagccaccgcgcctggcccaacctcaatcctttttaaaaatctcctgaataagcacactctggggttgcatggactgtgggcctggcttacctgggaaagggggtcatctaggaatactctccccagaggagaggtgaaagtgttgccttcttgcttgaggcaaggcttttctgaccttggcatatgaattttttaaaaagagacagggtgtcactctgtttcgcaggctggagtacagtcacatgattatagctcactgcagcctcgacctcctgggctcaagcgatcctcctacctcaacctcctgagtagctaggactacaggtgcacatcaccacacctggctaattttaaaatcttttgtagaagggggtcttgctatgttgcccctactggtcttgaactcctggcctcaagcaattttccctcctcaagcttcccaaagtgttgggattacagacgtgagccaccacagcccgccataggttttaaaaggagagagatgaagtcttctgacttccctctgcagaagagttatgaattcataatacattgcttttggaagaaaaggcaggctcttttggaggcctctggtctgggtgagcagggaacagttatcacccattgacatagaagccctcacctgggtatggcaactgttctgttcttgaaattataaaatgggagggaaaagctatcttctgatgtgatgattctctgattgaccctgagggtatttaataataaaaacaataaatctactaacaaaaacaagagtaaagagtggcattttggctcttgaggctggggatagtattcaggaaatggccaggaggatggggctcctggctcaccccctctgtttctatctggaaatagagctactgaatgtgaagaaaaagtcctcctccttatacatggctttcagattcctcaaggatcaggatgttctgttctctgtggtcttcataagttatggcttagatgtgttaacagactggacctcctcagtattagagtcctggagaatagacaggcctcaagaattaatctggaaaacagggaccccatcatgacaacagctcagaaagaaaggagagcaaagctttggggaatagaaaagacagaaaacaaagaggggaaatgaagaaaaggggtcagtggagcagaccttcagctaagagacctcagggaatccgctctggggacctttctgaggaatgcagtgtggtgccaagggcagagtttcttccaatgtgctctgatgacacttgcccaggaggttctgggagaaaagagttctgtggtcaaatacctttgggaaacccagtatcctgtggactcctctcggagatccccaaggcatgttaatagatttggtccatagtaattcagtgaaaaaggaaaggaataaagacttctgaaataatcaggtgggagaagaatctcagacaaaatgtgatgagctgcattgattaatcagaggcaactgaaatcagaggatcctctcgattagacttcatctcttccaggagcctacagtggctaacctgtgtggtccatcccctagagttgtcatcctgtctgtcaattatgccagttttgctgatgttgatggcttagcatacaaaggtgtataggaaatagtgtttctcaggtcactgtctgagaaggagtagagcagagaagagacatcttttttttatcagagtgtgccctctggcatccctctgccatctatctaacattttaatttgcaaatataaaaacaccaaggagttggacctttggttctctggaccatttaatcttatactcctgtttagagaacttcaccagctcagtttaacagaacagcaaactggttgtggtgtgtcctccagttgatgttttagatgggcgcattatatcctgtttgggaaatggtctacaaagacgttctttacaaacattatcaagcttttgtgctgcactctccctgccctaaaatccaaagatggcttctcagttgtctgcatgaatgtgtacgcaggcggggagatgcagaggctgttgggtgacaaagaggcatacctgatggtgacagaggcgcactgggccagcctcctgcctgcactcttcaggccggtgtagatctgccccatctccatggctccttctagccccaccacttcaaggagctggtcactgaggtctgcagagcgagacagcaaaagtagtgcatacacatctctgtgttcctcagacaagttctggccagaaagtctggtccccagatggccaatgtctgtatcccttcatctcccaccaaacacctttttcatattcactctgaatagggtgtttccccaaagatcaataaatgtaccttttcatgaggagatggtcagttttagtgaaaaaagattttgattcagacatcatatatatccaataaataggttaccatatcaagaagtctcttcaaatgtagagtgacataaatgatgaaccagctatttctgattattttcaacccctatgcagctaaagacatattggtttggaactaggataggaaggaatgttaatgagggccattacccaaagctggaccaagtctctcttctctgaatgtctgaataacatttggccccactgacaatgactgatggttaattaacctcaaatttggcctgtggtaagccactggtgagccagcctccttggacgtcctcaggaaaaccaatgacctctttcaggacaccaggtgcctaatccaagccaaggaaaagaacatttcaccaacatcagagtctgtgagcccacagtagaaaaggaggggcaggaagtaggaggctcaggctcagagtcactcaggaccagtggtctcccacagtgggatttgcttctcattcacaacctagatgaggtccttttcttcagcattgctgaggcttggatggtgcttccccagtttcttgtgaaagcagtagcaggattaatgtttgatgttgggctcaaaactcacttttccagcacaactttcatttatttaaaacagaagcaaaataaaacggcagattttaaaaaagctttccattcctttgcctaccaaggcaagagtagctttctcataagttgtggctaatcactaacatcctcttaatatccacaaactagaaaactgtgtctatgttaatgctattgcttatataacaggtggcttctgtcttctaaagtgcctcctggtatagtataacagtgttaagattggcaaggagatatttgagtttgtctttactcttgtttagaaggctaactattgtttaaaaaacaatctcttgacggatgtattcctagtgaagacagttaaacaaaccattgggctgaccacaaatgtgtcaacattgctagtctaaattactgacgatcactaatggacatcactaatggacatcagctgccaacagatacacggcttgcatcagtctttctgtgacaggcacatagctttccccctctacatctactgacaatcacattctgccctagtactcctttcttcatgtttgtgaaaagatactgtctccttaaacactccatctcatttggacttggaaaaagaagccaggaaagggtaatgtttgtttaggagaatgctccaggctctctgaaggagtttggacctaataaacaatgaatgtctaaacctctagtcacttaattagcctccttcttaccaaagagggttgaataacgttggatggtctagctcactgtgtcattccaatagtgtctgtgaaaacaacatgggctataaatgtgtgtgtgtgtgtgtgtgtgtgtaagataaagacagagagaaggaggagggagaggaaaagggtgaggaggaggagagaaaggtatagagtatgtctaggggtgagggggtttgagggttgatgttgggataggagagagggggagaaaagagaagcagaactttgcagaagtctcttgagtggcagagacagatgtcttggaaactgttgttctttgtaccaggctttggtgtctgatggtgctgtgatagtccaatgttttccctccttaaaacattccctggtaacaaaatgttctaagaagcaggggacttaatagactcaagtgtttcagctttacaatgtcttggtcttttaacaaattttcccgttgaatggctttaactccgaagttgttatcacttcccacacattaccttgcagctatcacttcccacacattaccttgcttcctggctctagaagagaagtaatgaaggctgatctcatcagcatggtgggtgggtgggggcaggggcttacacagatgtgggactgaggagatttgtagggaaaggggctaggatcttggcatactgtttgccatcctgcctttgagttttccctggtgtagagaggctgagatgactaccactgaggcaggacctggttgctcttttacttctctaccattgccgaactcatctttccttctacttcctagaatgcctacagaggtcttgaggtaaagaaatctatgtaacattgtttcccaaagttataagaccacaagacccttttcttgtgtgtgatgcctataaacaacccaccgcttccattttttaggaacgcattttgggaaattctggcatcacttaatcccctttacttcctctatcacagagatactcaggtacaacttaaatttggagttaaaatgaaaaagaacagaatgcaagtcagtgtctaggcacacagaggaattaatgtttagattgagacatctggtataccaggtgtctgttttaccttaagcatcaatgattcagggtgtgattttggcaattcatgtcatctccatattgtctttacactcttcaactgactagtatttaagatggaatgtgtatgcaccttagtaaaacaggaattcactcactcactcactcactcactcactcactcactcactcattcaacagttactgagtaacaactcagtgccagacactgtcttgtaagagttgggatgcaaaatgttctattcttgaagggctcttagccaagagggagaaaccaagttaggtgtagaaaatgctgcaattgaactgcaggatcaaggaagcctgagtgactgattctgctggggcaaagtacagaaggcaggtgtcccagacctctaaaagaggtcttcaaggatgaatgagcgccaaggtaatttttgggttgaaaagaggaaggaagaaggacattccaggcacagggatgatcatgtgtggggctggaaagtcacaggatgaagaaaaaaataattaagcaataaacctacttggcaatttcattggaaaatataaaaagtattttttcctaaggagaattactgtccagagactctttttggccagagctagaggaagagggtctctgggccagcatgagcttgtcacatccatagagctaggactttcaatactgctcttatttattccttggtagcaaagccttgtacagtgttttgtgtgtagtgaacatataatataagcactccaagaaaagaggatgataacaaatgggaaaatagaaaaaggagaatgtggaggcaagggaggaaaagcaaggacaacagtgggggttccaatctggcccatccagttcagcctccaggaaatgcaaatctgattatgtcatccccatatgaaaaatcctcagtggcactcatcataataccaagtgctggccaggcatggtggctcacgcctgtaatcccagcactttgggaggctgaggcaggcggatcatctgagatcaggagttcaagaccagcctggccaacacggtgaaaccccctctctaccaaaaatacaaaaaacattagccaggtgtggtggtgggtgcctgtaatcccagctatttgggaggctgagacaggacaattgcttgaacccgggaggcagaaattgcagtgagccaagattgtgccactgcactccagcctgggtgacagagtgagactctgtcttaaaacaaacaaacaaacaaaacaccaagtgctggggaacggaatatgcagtgtgcatactttcacactgaaaacgtaaactgataggaaggaaacaatttggccaattttactaagtataaaacttccttgctgcttgatccattaatttctttcttggtattgatcatgaaaatcactgatagaaactaagttcatacaaatatgtacattgtggcatcatttgcaacaggaaatctccctacccccatttcttcctgtatgggaatagttaaataagtgaaataagtgatatggtatctatatgatgaaatttttttgctgacattaaaatatttacaaagtttcaataacattaaatattgtttatgttaaaatgttaagtgtgaaggcaggatataaacttacttgtatagcattctctcaactaggtaagaatatgcataaaagaaaaggacaaatcccaacaaaatcttaacagtggtgagttctaggtaattaaattaaaggtaattgttattttcttctttacgctttttggtatttcttattttttataagtgtgcattaatgttataacaaaagtcatgtataaaaacatatcaactgctcttcacagttataaaaataatgctcacattccctggtttgatgcccaaggtccaattcccatctggcaaggggctgcctctgcagttttacttcctgtctttgtggggctagatgcctgccgcagacatacacaacatgtcattccccaggcaaaccctactgtttcctcctctgtgcttttacatgtactctacatatactttctcccactttcacttgtctatcaaaactcaggtcaagtgtcatcaacttccacaagttcaaaatgaacttcaaacttctgtgcctgcagtttgacttagatgctcctcctcaaaccctcccaggtagatatagtcaaagaaagaacaaggaagataagggcattgatgatattggctgtgggcaggagatggctgcagtaattactgtgccacagggtctgggttgaataggaaaggagatggactgaatgaaaagggagaaggtgagtaagagacttaaggagttctagaaaaagctgttctgagacagtgaaagagagggttggggagaggtgctgtgaaaagcactagccgatgcacaaattccacctgtagtcccagtggtgggcagctgaagtggatgttggagggtgggattagagtctaggagaaatgaggctaggccagtggttcctaaactttgctgagcgttagaatgacctggggagcttttaaaaacaacaatgccaggttgcaccctataccaattaaatcagaatgtgtgagcataggagctaggcatcggtctttgtttttaaagatttccagatgatgaaaaaatgagcacagtttgggaaccactgggctaagttattgggtggatcattcccattggtcagtggttctcaaagtctggtcctggaccggcagcctcagcatcacctgggaacttgttagaaatgcaaattcttaggccacaccccagacctacccaatcagacagtctggagtttgggcccagcagtctgtgttctgacaagccctctggaagattctgaggcgtacttaagtttgagaacttgggccttaggcaagaaaactgcccaaaatatatacagaagttggagtgaagaagaatgtcaacaagttatttcatgactgctttgatctattgctatttcaatggaaaatttgaaataataatattgacctcaaagtggggttatgagatttaaatggcagacctgaatgtgaaagtggctggcacagagtgggcacccaaaatacattagtttcactttcctttttctccacattcacccggacaactcccaatggtcagtctatctaccttcttagagctgtgtacaagagtccctaggccgtaatattaaggctaaaaccattttcttaaatcttcaatattcctcatagttttacacttcctgtaaaagtcagaactccagatgagcttgacactgatgagtaaatgctagcagaacactctgggaaacatctgacatgtccagtctttctttgggaacatctggaagccaaaacaaacaaacaataaaaacaaaaaacaaaaacaatgttcaagttccttagctaggtgtgcaaacatccctctgcttggacaactcctgtttagcctcctgggatgccccaagcaccatgctagttccttcttctgtgcttagatagtggatctcacccaacaactgtctctgtacatatcactctctcaactccattgcgagttgaaggcaggactgtgttcttgttttgtttatctttgtatctctagcaactagaccagcctttggcatataaaaggttcttgatatatgtttgttgaataaactgaataatatagatgctttagagccaaagactttgacaggtttggccagaagaaggaaagagataataatcaataataataataataactatagttgtctgcagttatcaatgggggattggttttaggacccctgcaaataccaaaacagatgctcaagtccctgatataaaatagtgtggaatttgcatataaccagtgcacatgctcctgttactttaaatcatctctagcttacttataatacctaacacaatgcaaatgctctgtaaacagctgttatgctgtattgtttaaagaatagagacaagaaaaaatgtctacatgtgttcagtacaggcataaccatccatttagaaaaaaatctttgatctgctcttggttgaagctacaaatgcagaacccatgaatatagaaacctgactgtacttgcccagattgtactgggtaacaggctttccatgaattcactcatgtaatctgcatatgacagtcaatttctacccagcctggtttttgcctctctcctttattgcataatttttctgtccattctcatcccagttgctttttttttttcccccgatatttggagtcttgctttgtctcccaggctggagtgcaatcgcatgatcttggctcactgcaacctctgcctcccaggttcaagagattctcccacctcagcctcccaattttctgggattacaggcacccaccatcatgcccagttaatttttgtagagatggggtttcaccatgttggccaggctggtcttgaactcctgatctcaggtgatctgccagccttggcttcccaaagtgctgggattacaggtgtgagccaccgcgcccagtgcccgcttgcttttttgcattagtgaaaattcaatcaatcatttaagaggcaggggaatctctgggtgtcctgatttggactcgccttttgcaatgcctttgggaagtgtgggatatccttagcttaagaggatgctttgctaccctcaatcccacccccactccacttccccttccatcagcacaccagggttcaggtcttggggctgccatggagcagcccagggaatcaaacaaccctgaatggaggggcagggcccctgactatgtatggagccaacagaatttctaaaccacaccaccatggtggcaaggaagcctgccccataccttagagcatctgtgtcatgtgataaaacctgtgggccctgtctgtttacctgggttacagcagcactggcgtgctgagatgttaggtgctattgtttgggctggaatcctgtcagttcagtgggtaatgctagttagccaatgctcatgttgagctcttaccgggaggggtatgcatctgattcattagaaatgcaaacaggaatttgtcactacttaataaatagccactgatagaaaaactgtagtcacagaggtaaagaaaaaagctgggaaactctacactaagttcttgaggatgggactaatatcttaattgctgtgtcatttagggtaggtcatttgttctctctgagcctgttttcacatcttgaaaataggggctgtattagtcagaccaggcttccacaaacaagcagccacaggctgggggccttaaacaacagaaatgtattttctcacggttctggaggctggaagtccaaggtcaaagtgccagcagggtgggtttcctctgagacccctccctttggctggcagctggctgccctctggctgcctcttcacagggccattcctccatgcatatggaccttggtgtttctctgtgtttccaaatctcttcttataaggacaccagttggactggattagggcccacccaaataacctcattttaacttgatcacctcattaaggctctgtctccaaatacagtcacagtctgaggtgctgggggttagggcttctttgacgcacgaatttttgggggacacaattcggcccatacagggataatcataaaccctacttcactgtgttattttgagaacaaaagagataaagaatatgaaagtgatctgtaaaaagccatgtcccttatcattgtgctactgagaagctgacaagcgctgggtgtgtgtgggaacctcttaacctcctcagaaagaaaagacacaagcccagctctgcttacagtggggccagattcagtccccacagtctagacaggtgagtgggagctgtcaggcctctttgcagacttagcccactaaggcgccggcaggcatgtcctcgggctcctctcctgcctccaaatttccatggagatgggcatgtgtccttggtggcttgggcactcaaagcccaacaaggctgggcactgctcagctcctctgagcctcccagttggactggtctgcacagatgaaacactgctcctggcgaaagagcttcaaagtgcagctcaaaggcaatgtagcctgaaaaaagcctaggggtggggaaacggaaagaatccctaaagactgtttcctgatcttccacagggcaaggggactggggttccccaggaacaaacgagtaaagaaggaaagctctaactggtccatcttcatcccccatgttcctgcctggcctctcaaagcaccaggccttcaggcatcccaaccataactaagctgaagaatactctgtgattaatgctttccccagagaaactgaccctgtcatgaggagagaggcagagggcttattccttggtcttccatgaacccagcacagagaatgtacccctgtgacaggttgtgaaacagcacgagcttcggacagagttgggtctgatcctgtcacttgggagaagactcttaacttttccgagtctgccttttatctggaaaatgtattaatagatacaataagtcactggcagggttgtctcgaagtttagaagggatgccctcaagtaccttgtatgaataggatgggatcagagcagcacacagagggccctcaagaaacacttgctcttactgcgattttatgtttctttaaaaagggatgtactcaagaagttccgactttgctacacagtaagtgcatggccttctgtagatggtaattaatgtaacttagagaaggttatggaggaagaggaaggcaatgaaagggagggaggggaaggataagtgaaaaaaaggagaaggttgggggaggattctgaaaaagagaaaggcagagagacggtaaagagcagagagattatgaccttgagaatttagggtgacttgcccctctggcaagtgaagcatctttattccttttttttctttttactccaaaacagggaggagctcacccttttatctgaaaatgaactcccctcctttccctgcggctgtgtgtgtgtgtgtgtgtgtgtgtgtgtgtgtgtgtgtgtgtgtgttgcaatcccacaaccatccaggttgccttctcttgttcctgggctgagcaaggtgggagcagagcaggttctagacatctttaaggcatgggttggatactcttaggccagttgggtaccccgctcctttgtgccatgcccttgccacactggcttgtgggtttctgctactctcagggctctgtaaagccccatcaaagcatgtaagtggccagagggcattgagtggcctttgagtctggataatcccattgggaagagttaggaaggagaagcagggagaaccactgcttttggaggaggagaggcctgcagagcctgagggagaagcgacatgtgggcccagcgggcaggactggaattgtggtgtctgttctggctctgtctaattgtgtgacctggaaaaatcatttccctcctcagggcctcagtttcctccagttgaggatggaggcatcctatccctaaggtctatttatgcttttccagccaagatggaggctggatttcctaatgggctgagtcaagggcagatgggtaggagacctcacctgttctcacactgtgcagaagacagaacattcagtacagccctacactgaggcaagagaaagtgtgaggccctgcacacaatggccattgttgttggttcctgaaaacctgctcgtgtggtgggtgggacgggaaaaatgtgtcctccattctgtgtggctttatcttctgggattctccagggctccgatgaaggcgctgtatgttgtgggaggtggactttgaaagctctgtgcatgagggtcaggtgcttcagagggggaggcagtgccccggcagagctgtgtggtggggaatgtcccagtggctctgaagcaagggtctgacaggagcctgcctctaagagaagccaagggtggggatgtcctttaaggcctgggagccagcagagctatggaatcttgatctggtggtcccggtgaggtccagtgctgggcacagactccgcagcctagagctttacaaaggacagaagcaagaatcgacacatgggatctaattaaactaaagagcttctgcacagcaaaagaaatgatcaagagagttaaccgacagcttacagaatgggagaaaaatgttggaaactatgcatccaacaaaggtttttctttcaatccttgtggcaactccattaaaaactactatcccaacttaacaacaacaacaaacccttcaggctcagaggctaagaaacttgcctaatatcagatagctggcataccctaaagctggaattcaaaccaaggcccgattcaaaaaataagctcatttgaaaggacgcaaggcagagacaaagtaccttgcagtgacagggtacccgaaggcagggaggtgagcttgggtgggggtgagcctcttctcatctcctctcagggaagccttggctacatgatcttattaaatggaatgctgaattctttggctcgaaggtaaaatactagttggtatattatctggcattactttacccactgagctcaggaatcttattctgggtacactgtatgtaataaaataaatcaattagtggtaagattttccaccttaactcaatcctgattctcaggcgtggcatatacaaggtacattccagagatctgcactggccaaacttatcacagctcaacaggctgcctacagcacctactattgagagatcatctcagaaagatcttataagggaactaatcacattcactaatatcatctcagattctccagaaagacaaagttggaggagagtcacgacagggagggccttattctggtggttgggtcagggttggccagaatgggggaggtgtgggagggtgttgggtgtgtgtggaaagaatcctatgtttggaatactaggatttgggctctagtcccagatccaccagctaacgcagtcttggataggtcaattaaccctccctgggccttgtttttctaatctataaaatattcctcgggggtgctgtagaggattaaaatgagacgatgaatgtaaaatatttctggcatctagtgctagatccaagtaagtgattaacacatgctggataaatagacctgaggatgaaaagagatgggcgctggcctcatgctggaggtgcaaaggggcaaaggtccctgctgatgcctctgctctgctaacagaagcccctggtgatggggagaggtttgggcgtggaggcaggcaggaagaggctgagcttgttgggagaaggagcaggggtcctgctgggtggtttttggggagggaggaatcacctgtgtggcagtgtcctctgtccatcccttgcttactgttggctttgtccattcttcccctttgggttgttgactctcaatttgaggccttggagccataagcccgcattctgcattagtctcctcactggccttgttactgccaggttcttccccttccttctcatccaaactgcacatgactctcagatcctattgctcccggctgaaaaagcttcatctcttcttattattcaaaggatcatgttcaaactccatgaacagtctccatcttccggtctttgctttgctacttctgggtttcagtgcccagcccatgttgcctttcttttactccctgtcttttcaaatctttttgagctcccaggactaacacacatgcatttcatcttgttcattcatttgttcgtcaaacatttgttgatcacctactagctgcattgcatggtgctgggcagctggggcacatgtgctgaagggaagacctccttgcctcccacactcttataaactcatctcttccactccatggtgcttgctcattatgccaatattaacacgattgttctaaagatatttcttacatgtagatagtagattgccaactacttgaggcctggaccatattgttttcttgtctcctcctctgcagacttggagcaccttagatacttgaagacaggtttgagtccaggctctatcgtgtgttatctgtgtgattttggcccagtcacttaatcctactgagcttcagtgtcctgagacataaagtggattaaataattatgcaatggttttgtcccataagtaggtattcaataaataatagcccaacacatatttgctgattaagaagattaaaccctgctatggactgaatgtttgtgttcccctccccccatattcatatgttgaagccctaatttccaatatgatggtatttggaggtaggcccttaggaacataatcatattatgagggtggagtccttgtgaatgtgattagttcctttataagaagagaccaagagagatgatctctccacatgaggatacagcaagaagcatccatccgcaaaccaggaagaagactctcaccaggaaccaagagtgcttgtggcttgatcttggacttcccagcctccagaactgtgagagatcgatttctgttgtttacgccacacagtccatggtattctgttacggaagcccaactcactaagaaaaacacttcttgcaccaaatagaaacagatcacagagaataccaacattcaggctgtgcagagcatgtggccaggacggagttttgctgtgggatggagcttaggtggtgcccaatatgaaatggtctatgaattctgcaggggaacagagactagtttgggggtcaagatgggcaagtgcaagagggaaaaactaaggtgtctagtcctgccaaagagcctagcctagaattttcttctgtatgtgaaaagtgaaaggttccttggctctgtggttctattttgagcagcaaacctcctgaggcaggaattaagttggagttcaactccagctcaaacctgtgtgagcaagtttttcctctgcagatgctgagcagcctcctgaggcacatttccacctcgccaggccctcccaggtcttgcagaagggagtgggagaggggaggagacacagctggagtcagagtcttcttcattcagacgtcagctgagaaagagtgaatgattgcttcacttgaatttccagtgaatttgagttgggtcaggaccagccagaaactgcgaagctggggtcgggttggggtggttactctggggtttgtagaaagaattgtacgtttggaatactaggacttgggtccagtaccagatgcaccaattagtgtgacctttgataggtcaattaacctcccttggcttcctttttctaatttataaaatttattcttgatattctttggaggagaaaccagacctaccagtgcagttcttctcaaaaacttcagcgtatgtgcgatcaccagcagatcttgttgaaatacagactctgcttcagtaggcctgcagtgggacttgagagtctgcacttctgacacacacccatgcaaggccaaggctcctggttcatggaccacacggcgttctagtgcagggattgactaaccatggtttgaggatcaaatccagcctgctgtttgcttttgtaaataaagttttatcagaacacagccgtgcccgttcatttaaatattgcctatggtggttttcatgctaagtggacagagctgagtcgttgcatcagagactgtataatgcacctagcctaattattttaatagttactacatggccctttgcagagaaggtttgccagcccctactgtaaaggactgaggattggtctgtgtgagccaaaagatctgcatttctatctgggtttggctaagggcaagccacttcaccttgctggtactcactttccttatccagggaacaaaataatatctacatttccttatccagggaacaaaatcatatctacattcctaggcagcctgtgattctgggatttcagtattatgtagaaaacatcacagtttctatagaaataggcatctgagaaccacgttgaatggcctgcatttggaagctgcaaaaacatacctgccctaacctggcagagtctagcaagtcagatcccgccagatgccatgagaggtctgcggaaacagaccacagctactttctgatgtagagtcagttgggaatagaaaagggcttgagaggagagaagagtgagaattggaggccgacctcctgagctccagtacaggtggatgctggcagaggggccctggcacagcgcacgccagcatcactcacacaaattcactcttgctgagagaccaattcaaaaacaatcccctaactcactgctccatgtgcccctgactgggtgcatttggtcaaccaatattgacaagcccttttgaggcctctgagactctgccaggcacagggatacagaagggattatgacatctggggcctcctgagggcctcacagtctgatgggagaaacaccatgtaaataaataattatatgagagttcctcaagccagtcgtgaagggaaacatgtgactctgggtctccagcttgggcaacaggtgagacatcaataaggcagggaacatgggtacggggaggaggcagtgtttttaggagggggaaggatgtgtaaagatggggaagataatgactagtttggggcatgttgatttcaacgtgggctgcttgaaggactaaatgacaaagctgtgatttcctgtgaaaagcaaaacagcgtctccgtaggcctgcaaatgttgaacgggaatgacatgtatgttgccatggttactccccagagctaagaagagtcccagtgcacacacccatagtacttctggggctccctaggggtcacctgtcttgctctgtctcagcccacaggagagacctgggccagagaggatctctgttaaatgcaaactttttaggaacatttttattttctctcaactcggaagagtggtggctgatcatttctcactatgactgtcaaatctccactgaatgggaaaattgggaatctacagacctggacagctcctgaacccctgaggccacattctggtatggcttcataaaggtgaaaagaaagccatgagaaacagtgaactcgtgctcacaattattttggcgtctcagctgatctctagttcctcacctgggagtatgaatctgagatggctgaatggcatcccattcccttgctttgggattcagggcatagtccatacaattagtgagaatccacatgggcacagtgcacagacagattgaaccatacgtgcttgcaaagtagcagagccaaggtattgcccttcccaggtaaagtgttcacatctaggagggcagatctgatgactacacgtatttgcctgaagagtgcttgtgcctgctctgctcagttggtttgagtgctaggctagtgaggccacgggcatgcctatgagctacacactggcttgctggccttgcctgggctctgggtagctaagcaattcttagtacttagcatagttcctaattatatgcctgtctgtggggttattttattgaggcctggctcccccacacccagtggctataaagactatgtttgtttttggttttgttcaccgttgtaccatggtgcctggcacgtggtgggggctttgtaagtatgtgttaaataaactgacaggaagcctgtccccactgctgggaaaatgactcagagtgaacactaccgagggtatctgtctccctgtctttgtttaccaagaattgcaaaaagtattatctagtgagatcctggggagattttgtgctacccatttataaccttctctagtggctgggtgtggtggctcacacctgtaatcccagcacttttggaggccgaggtgggcgaatcacctgaggtcaggagttcgaagctagtctggccagcatggcgaaacctagtctttactaaaaatacaaaaattagccaggcacagtggcaggcacctgtaatcccagctacctcggaggctgaggcaggagaatcacttgaaccttggaggcagaggttgcagtgagccgagactgcaccattgcactccagcctgggcaaaaagagagaaactacatctcaaaaaaataaaataaaacattttctaggacacaccatttgcagttcaaataggattgaccaagaaatcactgagaggaaagttgctttaatatcagacagccagaggggccaggtgtggataacacaggctcgagaccactgctggcttgagactgaaggctggataggagcaggcatgaggatcagtgaagagtctgaggaaatatgcaggaagcctctgcatttatattttaggctggggccagagagaaacaatggcatagctccccaggactttgctcctcaaccccagggggaccgacccagccttgtgccatgcccttggtgcttcctcaggatccaagactgggcaccctccccctccccttgcttcactggacagccagctcaggtggaactccacatgggcagcaatagccaaacatgtgtaggcacagagccaatacataaccctagaattacaggttgttagagccacaggcaatttaaagataatagatgaaatcctgaagccgtagtcaagagagtgaaattctaaatttggcccctttcttatattataaataccttcccccacacctaacaataattctgattactgctgaccaagggctcaccaggttccaggcactctgctcagtccctacatggatgatctcatttaaccctcaaaacaaggctgagggagggagaccatacttgtttccatcttgtaagtgttgaaatggaggctggagatgtccagggactcatctaatccatgactggtgctgagaagctctgggtcttctgaattctagttcaatggtgagtccctactctaccctctctcaattgcaagtcctctaagctatatttgaattacctatttgaaaatggccagcacatcttacttatcaaatgagtttataatagctccatgaaattaaattctcagcctcacaaatactcacatgtaactctaagatttttttttttctaaagatttttcactaagtacctgttcctgtcctactccagaatctactgcccactggcaaactggaggcaagattctttcccctctctcccctcttccaacaaacgtttctgtagaacacatgtgagccaggcagggtgggaggctttgaaggggacacaaagataaagaacatgtgatcctcattttccaggtaatggcagggaaaacatatgatgagaacacacatgcccgtgacacaggcagacttctgatcagtgtactgatgagatagaaggcaaaattaagtgctcagggaattcacaggctgggctcgcttccagcagccattaggtaggccttgcagagggagcagaatttcaacaaggagttgtggagcctttcctcggactgggtctaaatacttcctatttcctgagtgcgtggctgatgcaagacacacagtagactccctaacgcattttctaaacactagccacttgggctaggctaggagtcatgggcttgaatcttggttctgatgccaccactggacgtaaattatataaatcctaccctttctctgggccttgattttcctcaactatgaaatagggatatggaggaggctgggtataaccttgctcatgggtttcgggttaggattacactaagttaatacatgcaaaattatttgcaagccaaaatgaaatagaaatacaagagactgtttctcactattcttattgttgttacaaaaactaaaaaatagcaaattccatatgcttctcatgtagctaagaacctttcttgggggggggcggggtaactacttgaggccaggcactggggatacaaagattaataacaaccagcctccatccttggaatctgaaaggtctaggaaaggagatagtaggtacaattggtaatataagtttaatgtgctacgacaaaggctgggctagagtttggcaggagctctagtctttctttttttttctttctttctttctttttttttttcttgagatgaagtttcgctcttgttgcccaggctggagtgcagtggtgcaatctcagctcactgcaacctccgccttccaggttcaagcgattgtcctgcctcagcctcctgagtagctgggattactggcatgcgccaccacacccggctaattttgtatttttagtagagatggggtttctccatgttggtcaggctggtctcgaactcccaacttcaggtgatccacctgcctcggcttcccaaagtgctgggattacaggcgtgagccaccatgcccggctgagctctgctctttcttagtggtagtgcaggtggatagtaatgcttaggacaagaacttcaaatgtgaatcaactggcattctccaacacaaaatagaattataggcgtagggactttttttttttttaggtttgagcttattatactatgttccaggcactttcacatccatcatcttcctaataagccatgtattattatgccagttttacagatgaggaagctgagacttagggtggttgggtaatttcccaagatctataaaactagaagcataaaggcaaaatttaaacccagattatctaactgtaagcatggggcttttcccaataccccttattgctttcttatcagccaatgtttctatagaacccattccatgctaatcttgaatgaccttcttactcggattgtttttcccaggagaaagactaatctttgatggagtgcagtggtgtgatctcagctcactgcaacctccgccccttgggttcaagcaattctcctgcctcagcctcccttgtagctgggattacaggcatgtgctaccatgcctggctaatttttgtatttttagtagagatggggtttcatcattttggccaggctggtctcaaactcctgacctcaagtgattcgcctgcctcggcctcccaaagtgctgggattacaggtgtgagccactgcgcccggcctgatgagagatttgagagcaacccctcccatcatcatttcctcttccatttcctatgataagctcattccctcctactgtgtcctgatttctccctctcctccaactccaatgaaactgccaaggagttaagaatcgcaacacatgaagaggctgcagagagagctctctgcctcctcagccagtagcctataaatcccgggacaaaatacactgagagaaggtagaaatttgaatataattctgtccaagaaagagtccacatagaccaaaatctgactatgccttaattttgcggaactgtaaggaatcttaaaatataattgtcagacttgcttattttacagatacagaaaactgagacccaagaaggggaaaggacttgcctcaagtcacacactagcgacaggcagagtctggactggaactccagtcttctgactcccaggcgaatgctttttcactaaaatacgttgcctctttagcttttcccattaacaactcaacttacatgagatcatagccctttcaagaagaaagctcagtgctggcatctctgcaaagcccagaagtcagtgccccactctgatcagctgatgtcctcatctaaagaacaggaagtggtttcacttctagctctgaaagcacattgtaggggtgagaaagggggatttggggaagagagttcctgtacatgatagtcaaaagcaatcagcagacactttggtcttgcttgaagaaggggaagatgtaaggtcagacatgtaagaggaagatgaaggttgtccttgatcagcacatgatctcatcaagagcttcccccagccctagggtggtggagagtcgaagtggggagcagggagggtggtggtggggattcagctctgctcattcccttctctgctctgagggagctagataccagagcgggggttgagataggagcaccagggtaggaaaatttgcaggaacttgatacaaccttcaatgcttcccctaccctctgttagcacccacaacttcccctgccaagggaggaaggaggaacacattattcagctttatacactgaaaagtttactgtgtgaaataaaggggacttaaggggtcaacagaggccgggcatggttcttcacacctgtaatcccagcactttgggaggctgaggcgggtggatcacctgagggcaggagtttgagaccagcctggtcaacatggagaaaccccatctctattaaaaatagaaaaaagtagccgggcgtgatggtgcacgcctgtaatcccagctactcgggaggctgaggcatgagaatcacttgaacctgggaggaggaggttgcagtgagccaacatgtgccactgcactctagcctgggtgacagagtgagactctgcctcaaaaaaaaaaaaaaaaaaaaagaggtcaacaattcctgaatcctctcttaaaggacagaggtgtggagatgatgtttcctgatgacctggcctggaatataacaatctgattgtcaaatagacgggtgtgaaacaagagaataacttccccaacccccgccttgatgtcagcggagttttgttttcttctagtggtgggatcacatcccaccttagcactaacagcctggaacatcaaagcacacagacgcagagccatggaatgccaggcatgggagagactgagggcatttgcctgtagcaatggtgttcaaacctggcagcccatcagagtcatctggggagctcattaaaattgagattcccaggaaccagcacagagattgattaggtagatctaggctggggtccacaaatcttcattttcaacaagcagctggtttaagaaccaaggttctggttcaaccccatccatccacctatcaaaactttgatacaagatattgtttttacagtaaagaaaactggggtgccaaaaataggttagtagcaggtcttggactagaattttgtctcctgcctgctggtatggtgtttctgccagcgcttttacacctggctttctcctccagctcacctgtccattgaggacctgtgaggacccgtgagcccacaggggaatcagctgccaggagctttgattgaatctctccatttggatcactggtggaaaatggctacttttggggctggggtagaggtggttttaaggacattctcagaaagctgtgtttgtattctggtgagttaaaagtggaaggcccagctggtggcctctaaagcatactacccagttgttccagacagaaagaatagttggttcatgggagcagcctgctgtgttggaggaaccagagtggaggaggcagagtgagcgatggagagagtggcagaagaggaggtctgggaggtaatgagaggccaaaacatacggggccctctaggccacgtgatctttggctttttctccaagccactgcaggattttgagaagaggagtgtcataacctgactgctctgatgtggtggtgagaacaggctacctagggcagtgagatagaagcaaggaacccagtgaggaagctttgcagtaatccaggggacagaggatggtggctcagatcaagatggcaggaatgcaggtggtgagacgtggttgaatcctggatgttttttaaaagtagctaacagattttctgatggactggctgtgagccgtgagataaaaaggggagtcaaggatgatgccaagcgttttggctcttgtgatgggaaggctggagttaccaatggagagaaataaggctgtgagtggagaaggtttgggggagggacagcagagctctgcattggacataccaagtttgaggtgtctgctaaacacataagggaagtatgacacaggctgctggacataggagcctggagctcagggaaagctggagacaggctggaggcatcatgagtaagcacatggtatttaaataaagtcttatgactggatggggtgatcaagggcttaagtacagacagtgaagagaagagggtcaaggaccctgcctggggatcctccagcatcaagaggtcagagagaaatgagaccgagaaggagtgacaagtgagcggggaggaaaaccatgagcaaatcaagtcctagaagccaagtggaccaagcgtttccaggaagagggagtgatcagctgggtcacatgccactgacagctgtggcaagatgagggttaggaactgactattggatttagctattggagaaccctggtaaccttgacattggcagcatttgactctgaacctcatggagccccacagcttgacaactgactgtcattgaggacacccttattgtgaatttttgtcttctggattaagttgtaaactttgcaacatcggatgacgagtcagcatatccgcagagcatggagtccttgctgggctgtggggccttacgaggcctgctgacatccacctgagggcacctactactgggcattgacctaaaacaattatcctcattcctggcttaccttgaacgcagaatttcagttctttggggtcagtgacacccttcctgctttcccggatcacagcccggttcttcttgttttctccccagagattggtgcctccgtacatgctgggaatgttgagaatggcaatgccttccaggaagatgttgctcaggtccaccccaaccccatcacactggaggacggagagaaaaggccatctgttagtgtcctcagtgtgtcacaacccaaggtgctctgtgtgtgtgcgtgcgtgtgtgtgtgtgtactctcttaaaggatgtgacaggtcctcagccaccaccctgccactgtcagaagagaaatcatgggcaaagtcgctcagacttaatgctttgactgctgtggtgagatgacagatccagtcctggtcagctccggggaatacagtacaggctccagggtcatctttaggtctagaagtgctttagggctggttcttaagtcaattgtcaaactgttctccagtctaatctcattatcatcaatcttgccccttcctaaccattagaagatttagtggaactgaattcagaacctaacaaatgacagaaaattcagaacataacaaatgacagaaaattttcatatatatatatatttttttgagatggagtcttgctctgtcacccaggctggagtgcagtggcacaatctcggctcactgcaacctccactttccggtttcaagcgattctcctgcctcagcctcccgagtagctgggattacaggcacctgccaccatgcctggctagtttttgtatttttagtagagacggggtttcactacgttggccaggatggtctcgatctcctgacctgttgatccgcccgcctcagcctcccaaagtgctgggattacaggagtgagccaccacgcctggccagaaaattttcattttgccccctcctattttatctctctgtgagaagcacaagactttaagctttggaaggctttcagaatctgcctgtctcctgtatctgtatcataaatgcaattttggcatatgtgtttgctgaaggagcagagtttctttatccaatctccacaacttgcagtccccaccaggtacaaaaagccagaaggcttgaattttcatctcacatgtctataaagtcagcccactttggcatcgtgcttaccaacacagcaagaaatatcagctctgatccttgttcctcaggatagtaggtagtttatttcacttacagaagcaaacactggacccagagacttgagctaagttatccaagcttgcacagctaataaataacagagcagggattcaaagttgggggatttgagtacaaagtacatggtctttatgttgtttattgggagaaagaaaaaatcaaaggcatacaataaaaacccactatctctgaggttacgtacaaacccaaacttccagagacttatcaacagagcaggactagaagacttgttgccattcatagtgactcacctcctgatttctttgcagttcttacattatgttatcttgtttccccaactacaagatggcatacagtgagcaactctggtaactgcgaactcattttttcactgggaagttctgataatttgagaggtctctttatgttgatctggattctctctcactcttgtttccaccagttggtcctgttctcccttctgaacccatacagaatgaccctccttcctcctccataggccaccccctagatagatgatgatgatgatgaagatcaccattgtgcacatgtattcagcactgccatctaccacacacaattttatacacatctcatttattatcttcctaataatcctataagttagttactatgactatcctctttttacactggggaaactgaggcacagaggaggttaagtaacttgcccaaagttcacaacttacaagtggaagtacacagatttaagggcaggtagtcagagcccaagttttttatttctcctccctctcacactactaccaggttgtgccacctctggactgtcaactctcttcatcttctcccatgagacttggttttcagatcttttcccatcccggcttccctgttttgcacacactctagtttgttaccctgctatttggcaagacccccaacattgaaaactacatcaacgacgggatctaatgggggcaggtggctaccacaccagtacttcttgtggctgaaattttatgatactatcatgccccagaaatgagatgacgtgcaaagctcatgtaagagttcagcacgttatccattatcattatccttatccttattatccaattgataaagattgcactggccattttgttagtggctagatgacaacatcacttcagcttaaatgggtggtcatcttcattgcccagatcatctcatgatctatttttcatccagttcttcgccattctgaacctgtgtagattttaaaaaataacatagacataaaactttacatttatgttaattaatttcatctggctctcagcccgtgtttcctctagtctacccagcttacttccaatcttcattctgtgaccttttgtcatcgcgttcccatcatttggggattaagtcattaatatgtgcgcataaaaggaaaaaacagtgaccgagcactctccttggtcagtttaacaccaaacattatgcgttaacatcctttggggtatggctgctctatcggagctgcatcttctggactggactgtcacccagcctactttttgttattagacagatgatggaatttagagatgagaggcacataagggaagatgcctctcatctttcatgcctcatctttcataaatgagccccagtgaggttaagaaacttctctgtggtcatctgacttattagtggtggagctagatatgtatccaggtctccagacctcaatcctgcgttctttccatgaaaacataaaacattgtgccgagatcaaacagcatttcctaagtgaccaccctacaacctctattagaaaagcaataagataactcaactaagtcaccaatatctgtgtgcaaagcctaaatactttgttaataatctattctagaatcttgccagggatcagaataaagtgtatcagtctgtggtttccaaaatgtaccctattcttattttttgaacactggagccatatttgtctgcctcttattggctagaacctactctgttttctggatttgtcaaagtggcccctgaatgacacctacaggcttgtccagcaacttggattcaaatgtgtgtgtgtgtttcaaagccagttagttctccattgatttaccttgggttctagtatccacctttggcatcttttcttccatttttagtttaaggccactctctttggaaaagatgaaaactcttccagaatggcacagtcctgttgagctatgctttctatgttctttttcacttcaaacgttgtctagcattcagctgggccttcagttagcctgaagccaggctcacaggtctgaattgcttttgtgtattcctacctggttgcatgcccaggctctgcctttgcgtgtatgtgtacagtttcctgaaagcataggctcaaccaacactctctgttgctgtcacattgattgaaaaacaaaaactgactcctttttcttttcttttcagtgtgattcatgacttcttagaaacttattttggaatgtcttctaccctcctatccttcatacacatattcctaattagagatttaggctagagtcccattggatcacactttcttttttcttcctttatttattttttgagacagagtttcgctcttgtcgcccaggctggagtgcggtagtgtgatcttggctcactgcaacctctgcctcccgggttcaagtcattctcctgccttggactcctgaagtagctgggattacaggtgcctgtcaccacgcccagctaattttttttctatttttagttgagatggggttttaccatgttggccagccgggtcttgaactgacctcaggtgatccacctgccttgacctccggaagtgctgggatcacaggggtgagccaccgggcctggcccacattttcttttatccttatcaccctctagatgaagcagccacttccccatcttggctgtagttgcttctacatcatctcaatttattcactgttggtcaaaacatccctttcccttctgagcagtaataagaataatattagcaactcatgcttggtgagagctttctagggcactgtgctgggattcacccatagtatctcttgcgatcttcacatgaacatgatgagggaggcagcattgctacccccaactgacagggcctcttaggggttaagatgcttgctcaaggctccacagcttcctactctacaagatggcagagccaggatgcaaacctaggaaggcagatgccagatcctacgctggagatgagtcagtgaggcaaatcgggatttttgctgatgctaggcttatagcaaaattaaacttccagctgtttgaataattgagatctcccactactgctctatcttatagagtgcttagagcaatgcctggcacatcaatgttggatattaatattattatatcttgcctccgcaccaggtttgttttttaaaaaagtacatcaccagcacagtccttgacaaatagtattccacaaagtcacctttcttccgtactacagttttaactgtaccctgtcccctccatctctatccatagccagctaagtgtgtttgctattaacttggtaaacgtttacctcttcctggaagagcaggcaatcctcactctgctttctaggttgtccccttcccctattaccgcagtgggtcccatgtagatagggcaagtagaggagatgggagaagcctggggtctgctggacgctgatgtcctccctccctcttggaatgcacctacttggaaagtgagagccaatgtagtgtcttggaaagaacgtgcctgcctgggcttgaaggcagagagacatgggtttaaatcttggctctgtcacttgccagcggtgtgattccaggttgtttccttacccctctgaggtttaatttgtcatctgtaaaatggaggataggggaataacatctgccttaaggggtgggttgatgggtgtctggaatgcagtagcactgtgtaactgtctgcgttatcatcacaggttccccaacctctgtgccatgaggcatttatcttcctgaattcactccccctacctgaggctttgctggaggcatcttaacggcctcttggcccgacccaggctggtaagagccttggcaagcgcacgcctgcgtgcccattctccagagttcctggcctcgcgatcgtgcactgatttccttcagaaccccaggcccgctctggacgtggaaggcagccgtgccgtctgggaaagtggagccgagcccgggacgctgtcggcctaaatggaacgccggccccggggcccgctccccggcgggttcccgagctaaatcctccaactgttccatgacgtcatcgggccccctccccctgctccggcccgcgcggccccagcgtggcgctaaggagtgtggcggtccccgcgcgcaccgtgggccatccctaacccaggacctggctagcaggctgccctccgagccgaggctgcgctgggcggaaccagggatttatagcccggagtggggctgaaacagagctcctggcccgagcagagagcgtgcacacgcatgaaatcgtgctcctgggtgcgccggcggccaggtgcccgatgtcggtcttggaagcagcgccggagtccgtctgaacccaggcccgggaggccagaggctgccggccacgttcaactgtgtcccccttgggaagacaatccccccagttctggtttcttcctgagccacgggtggttggttggtttggtggaaggcaggtgcacaggtaacagagacaaggttaggaggcaaagcacatttatgtgcaaatgagacgcgctagggaacttgtaatcctctgcacccccgcccttgatgtctcgatccctacaatcacagaattctaggcagaggccgccgacttctccgccctcgccaagagggacccggagcaccgaagcttcccagccggtgccggcgtttccgcgccctccttctctcctgcgccgtgacctcaaaagggcggcgggcgggggcccctccactccagccctgtcgatcctatttctgaagggccttagggaaggagattccacaatttatttgatgacctgtttcagtttttagcaactaggaaattcccccttcttctaacctcgattcaccgtgccacagatttggtttggacgcagacggttctgtttataggcctgccactcggctttgtctgctctcaggaatgacctccaccaggccagatcggaggtggaagccaggactcggtagctccgggaggcatgtgtcccctttctgctgggaattttctctttcttgggtaccctgtcactgagttattgtccctcccatcttccacgactctttcttggtctttctttaaaaaaaaaaaaaaaaaaagccgggcaaggtggctcatgcctgtaatcgcagcattttgggaggccgaggcagttggattacctgaggtcaggagttcgaaaccagcctggccaacatggcgaaaccctgtctctactaaaaatacaaaaaattagccgggcgtggtgggggacgcctgtaatctcagctactctggaggctgaggcaggagaatcgcttgaacccgggaggcggaggttgcagtgagctgagatcgcgccactggactccagcctgggcgatagagcgagactctgtataaaaaaaaaattatgggtattttcaaacatatagggaaagcagagagtataataaacccccgtgtaccccaaaacccagtctgggtaattagcacctctagcaacaggcagctaatcttgttttaactctaccccagttcactttatcaccaccagactgaactagtttatagcaaaacaaaaaaaaacaaaacaaaaaaacaaacaaaaaaaagaattaccttaatactattgttactctttaaaaaattctttaataagtatccagtagttgttcaaatttccttgatagtatcatttttttaaattgttagcttgcctgaaaagtctttacattgcatttgttgatatatatctgttaggtctcttttgatctatagactcctgttcttttttctccttgtcttttatttattgaagaaatgggtcatttgtccttagagcagtgcttctcaaacttgaatgtgcatgcagatcactccagggtcttattaaaatgcagattctgattcaagaggtctgggtgcggcccgagactgcatttctgacccccttcttggtgatgctgatgttgcaggtccgtggaccacactttgagtagtaaggctgtagtgttgcgcagattctggattttgccaactgcatctctggggtgtcttttaaacatagtctatcccttgtattttcactaaattggtatttttagatctacaggcttgactagatttagggttggctttttggcaagattactttattagtggggctgtatatttcctattgcatctcattaggaagcacataatttggttgtctcttttttgtgatttttagactgatcagtggattcaggtgttatcagcctataccttctattatacagttcttgtcttgacccattaatatagtcccctaatggtaggataccctagcaccttccctgtacctttcttctaaatctctacagatgctattttctccataaattatttctcgtatagtctcttaaaaggatctctctctctttttctttcttttttttttttttttttaagactgagtctcactctgttgcccaggctagagtgcagtggcgtgatcttggctcactgcaacctccacctcccaggttcaagtgattctcctgcctcagcctcccaagtagctgggactacaggtgcccaccaccacgcccagctaattttttgtatttttagtacagacagggtttcaccatgttggtcaggctggtctcgaactcctgactgcaggtgttccacctgccttggcctcccaaagttctgggattacaggcatgagccactgcgcccagcctttttctcttctctgcatctgtaatctcatggaatcaaagacctgaagggcttgaaaggtgaaccagtccaaatatctcattttatagaagagaaaactgaggctaaagatgttaagggaatggcccaatgttacttagctaattagagtgagctgatccagaattagacctgtgattgtttggaccgacaaccaagaagccatgagtaactttataaagaggaattttggctattggataagggctgaagcacagaatcttagaatgggaaagcaacatgggacattagagatcattcctaattaccaaaatgagaacagtgaggtctaaagttggtaagttgaccttcctagatgacacagctctctcctgggagagatagggcttaaccagggactctggggtgagtcgggtggtggtagtgagggaacagagtcagagtcaccgtgtggtttggtggcacacaggctggagagggaagatgggatctaaaaggataatgtgattgaggaaaaggtttttttgtggatgtttgaggcagagaagatactcaatacatcttgttggatgaatggatgagaagaggaagttgggatgcctaggatgggaagtagatagagggaaagagaagatgctgaacagagtgctgggacattgatctggggacgataccagggtccttcctttctcagcgagtgagagagttggccggggggtagctcttttgaagatggaagtagtaaatgctgggccatgtctggggaaaatagcacttcagttacagtgagaaggaagagagagggctgaggaagaggcggacaatatcctgacacacttgaataggggttctgatgggctgagaggggcatgggcaggagatgacggtggcctcctttgatgcctgggctccagatcagagccgcagatagaccctaaaaggcagaggggtggctgacctagacctgagtgaaatcccccaccaccccgcacactgcctcttttttgagggaacaggacactggcaggaaatagggaaagagaaagcaccaataagccaccctgtgcagcccccggggcctgtgggacttaggtaagaacgaggcagtggtgctcatttacagcgagagcatttctgataccgtgggcggggagcagcctctctctgtgaattagcttggcaggttggaatgtaagtcagactacggtgaaggctggatgccgtagggtctcatttggtttggacataggagagtagctgagggagagggttagctgagccttagtaaatgtcagttatagtagcctgaattctgcatagaggccacagagttgcggactacttacattgttttctgctgtacacgctgcctaaactgcccatcaactcttttatgcccgttaacatacccttccagctcaaaagctttctcctctatgaggctttcctcaatgctcttgctagaaatgaatcttccccttctctgaattttcactgccttgttttctcctcttaaagggaatgtatattctgccatgcattttgcatagttgtctgtcccctaggagactttaaactcatagaaggcggggaccatatctgacagctctgtgttcttcacagttcctggcatgtcttacccatatcaggtgtccaatataactatttgtgagttgaaagaaataatgtgtgcaaaaatcctaaaatggaaacccaggtgttctttgaagaaacgtgataaggtttctttgcttccgtatgagttcccccaacctctctggatgaatatagtgaacaaataaagtggaccaaatttccaggatagggagagacatggaaggttaatccaagtctccatcaagtggtcctctgatcacagctgaaggaaatccatacctgaacacctgaataggtaacaagagtagggcacatggggcatgttttatatgagagagacattaagaggcagaagacaggagtactcactgatctatcaagaatgatgagaacctacttattctgtgctagactctagggatggagcagaaatgggacacagtccctgtcctcaaggtacttccagtgggtcaatactagaggcagtggtgtgctgtcagtgcttaacagcagactcccttggaggaaaaaaagcctttgttattgtgttccatggtggtgtcaatattcctactatggccaatttcaagtgaccatgatgacatcaccaaaaggcaagttgggaagagatacaccagcaagcaagcttgctctagcacactgctggctggaggcaacggggaagaaaaggaagtagttacctgcatgtctgcagggcctatggccataatagagaaagtactgggagtcaaagaaaaacagggcaaacaacaatatctgttttccgcagagaaaaactagagagaatgtttctagtgtcaataacctgatgtggctcagaaaggaagaaaaggtgatgtattgagtggcgacaacattattggaaagacagtccagtatttttttttttaagacggagttttgctcttgttacccaggctggagtgcaatggtgcgatcttggctcactacaacctctgcctcctgggttcaagggattctcctgcctcagcctcccgagtagctgggactacaggcgcatgccaccaagcccagctaatttatgtattttttttagtagagacagggtttcaccatgttggccaggattatctggatctcttgacctcgtgatctgcccacctcagcctcccaaagtgctgggattacaggcatgagccaccacgcctggctttcaggacagtccagtattatccacatacacaaactggcctggcctgtagcaactcttacagaacagtggcttctcctgcattcagaggtgctggtttatatcattttaggagctgatgtctattgtgggcagttagataatgatattaatccacacgtatgttatatattattaatatatatcatttattgagtaactattgtgaaccagcactttatatattttatgtctaatcttcacaaccctacaatgtcagtatttgtattcccatttatttttttgagacagagtcttgctctgtagcccaggctggagtgcagtggcatgatctcgcctcactgcaacctccgcctcctgggttcaagagattctcccgcctcagcctcctgagtagctgtgattacaggtgcacaccaccacatccggctaatttttgtattcttagtagggatggggtttcaccattttggccaggctggtcttgaacacctgacctcagacaatcggcctgcctcagcctcccacagtgctggaattacagggtgtgagccactgcgcccggccttgtatttccatttttacagatgaggaaacattgactcggtgacactaaggaaggaatgtctttccaaatttgtcaaggttcatgatagtcctcatgaacctgcgggtttcatgcatgagatgcaagtgacgagatcaagaagtcagcccaacttacagagtgcatgctcccgatgcctcttactcttgtgctttgttacctatgagatcgcatttagagtattatagaacaggaatttgatttttcattttaaggcggaccatgaaaaaaatggagtgtatcaagagaagagtggtccaggatatttgtgggtctataaatcaagtcctctaaggaactgaggctgtttagctcagtgaagatgaaaaggagacaccatgaagatacatctccagccctatgaaaggcagccatgtggaggagtgtggaggatgctctgtgtgcccctagagggtgaaaatgggcccagtggatgaagacttcagtcatgcaccccgtaaacacttattgtgcactgattttgttccaagtattgttctaagtgctgtctagggaagaagatgacaaggaatgggacacacaatccttgttcaacatcaggaagaactttctgaagatcagagctgtccagtaacgcagcaggcttcttgaaaagtagtgagcttcctatctttggagtattcaggaggaggctgggtgcccacttatcagaatgtgctaggatgagtcttttgtggagtggtaagtggaactaaatccccttccagttccaaaattccacatctacattcagctttgttttggcaggctagtgtgcgctgtgctgaaagagtgccatcctgaccccccacttccacctagccttgtccgccctggtgtgtgctccgagttctctgacagtgagctgaggtgggccagttagactggaaagtggctgcatctgtgacagggatgatggagttctggcgggtttgtgtgggctcaaggaatgcggcattgaagccatgtacacacaacctgcttaagaacatcccatgggcagaaaatgttttcttcctctttagccctcctctgttgctgtgccaggcgggcacaatggtgcctttgagaggggcagctggaagggggtgttggcaggcagactggaagtagaatattgcagctgggggtgggggtgcccaaattcatttccaggagtgagccggcactgggtgccagtttccaaaacaaaactgctgtttctcagagttcacagtgatgggttgcttcagagttggacagaaggcaaagctgtttcctatccactgctccaccctccccaggtgtttttttctctttctttctttttttttttttaaactagtgtgttaagggattcttgctctggatgcagattaataggctttgctgtctgtctgggaagctgaggccaacctggagtggatggggctttttgagggatcacactttcctgcagacaaagcagggcctgatggcctgggggccagcagggatcatgggcaggtaggcttctgagccatgagagagggctcagaatggagaccctttctgccctgcagggtgacttccaccctacagccacctggcaccctcactgccacatgagctctgcccactcactgtcttaattctgttgggtgggaaagaggtgggagaatgttggcatttcctgtcctggttcacagttgtcccggaccctctgctactatcaaagataccaccaatagcttcctagagatgggcgtgggaggccttctcactcactgcgcagttaggagaaggcatgagtgccagccatcttcccctttgtgttacaaatgcagcaaggtgggcccctttttctggtagcttccaagaaaaaggcgggacttgaggctggccaagtgatcattgctaatgttcacaccaattgtggaattccctatacttggttcaattttataatcaacaaacaactattgaggaattagttcattttaggcattgtgctaagtccaggggtatagaatgaataagataaagtccttgcttcagaaagctgactgcctgatagatatgccaagtcctgaatgggagcccctttatcaactaaatggacacatgacttttctaaaagcaggaaggtaatgcagaggtcatctcctactgcaggtcccgtggcattgtgaagggcatatgggctggggatcacagattgaggcttgaaactcatctgatcttgggagtacttacttgttttatgagatgcagtttccttgggtaaataatgggaataatacacaaccatgcagagctgttataaagatgaaataagacagagcttgccacgtggtaagtactcagtaagttgctgctattgttattcatttgttgagcctaatgggcttgagatataacacgtgtgtgtgcacagtggtatttatccaaccccttgtagattctatgaccttctttaaagattcagttcttctaccttcttaattcctcttctagtgaagactaagattagtaagtttatgacttcacaggataagttagaaaaacaaagacatatccactatagccaacaagacatatttgtatataatattctctgtttaataacctgtgattgtagaggaagaaaaggattgtaatgtttctcttccctgaggttcccaaatctcccatgtgtggtgatgaagatcatgaattcctctgaatattctaaaaagtctaggtcatttcccactgatggggcctcgcagtttattattacttaaaagatgcatttgtttggtagacattgcttggggaaagttattcttttagtaagggaccttggtggtagaagacatatgcttcctggggctgggacagaagttggctgagaggatcttccagaaagaaatgtattgtgggagagcattctgacccaacatgctgaatcacttgacccccaactttggtcttctgagactttcttgggccccatctattaaacatgctgcatatccctcaacaactactttgtgaaaatgtaggcataaaacataatctttaaaagttacttctaagtccacggaagacacaaagtagatagagccaggagtctgaagacaaaagaaaatcaaagtaattcacaaagaacaaaagaaatggaaaagaaccggaaaataaaagcatatgaatgaatagaggcttgaagtgaactacagggtgcacattagtaagaaataaaaaagagggtcatttaagaaaaagaaaaagttttatgtgccagaaactgcaagcaaacaatggaattttgtaagggaaagttgacagaaacagtttttctttagtaagctgaacgattctaagcattagtgaaggaaactcgtagtcagtgcacgactgaaagagacagagatggggatgatggagctgcatttaaaaatgaataaagatttaataagccaaagaatcacagaggtcctcaggaggcctgatgataaagaaacaagggctaacattaccctaagattgaaacgaggccaatgttgtagcagtgctgattcctggttggtgggattgggggttattttcttttttgcccctctgtattttaaaatgttctgccatgaatttggattacctttgtaatcgggaaaagaggttagcccacatattaggagtagcggaaagaaaccgattaggaggaagcagaaagaaaccaagtggtgagaaccggtgaatgggcaagaagaagcaaccagaagtggcaggagctgccttggatggtctcacagtgaaggtgatgctggaatgagggagctgctggactggattgaggaaggggaataaactagaaggaggagctctctcaggaccattctagccttacttttgactccatggtttgatatgtaatcaggttggccctcttattttccacgaactcaaaatcccttctaatgctcttctcaactttcccttccccatgcgtgtttccatttcttccactgtggcggcatggacaggctgtacgtcagccaattcctactttccttactccagggaaaggctctacctgtggtagctgagaagaaggttcagatcatatcaggagagaccaagacttgaagacctctttccctctagtttaagagtgtgcagcactgcaggtggatgctaagacagagtagagaatgcccacagctggagcttaagagccgtgagttctcttctgcacatactggtttgggtgaagttagtcaaggtacttaacctgtgaagtccttgatgtctcttttttaaaaataatagcactggccaggtgtggtggctgatgcctgtaatcccagcactttgggaggccaaggcaggtagatctattgaggtcaggagtttgagatcagcctggccaacatggtgaaaccccatctctacaaatacaaacattagccaggcattgtggtgtgtgcctgtaatcccagctacttgggaggctgaagtaggagagtcacttgaacttgggaggcagaggttgcagtaagctgagatcgcgccactgcactccatcctgggtgacagagcgaggccctgcttcaaaataataataataataatggcgctggtttagattggaatagctaaaggtatctgcccaatcttaaaggacagtaatctgactcattatttgtgctaaatgttagttttagaatatggattctcataggtgagacccatatcctgatatggtgatatggattaaatatcaccagcatagtacccagcacgtccttttttttaaattaaattttttaaaatttaaccattttaaagtgtcagtggcatttagtcacactgtctttttaaagtgttagaataacatagtcatttgggttggttccattttgttgcaataaaaaaatgttgcattgcacctctatgctcatgtgcgagaaactctctagatcgatgttgagaagaacttgctgggtcatataggctataaatgcattttcggattggcgtgtattgctgaaccgctctccaaagtggcttaccactgatgttcccaccagcagtgtctgagagttcccatttctgctcctcgtcacggatagtggctgggttttcatggaactccatagggcagttaaaagtgacgaaccaggccaggtgcagtggctcatgcatgtaatcccagcactttgggaggccaaagtgggctgatcacttgaggtcaggagttcaagaccagcctggccaacatggcgaaaccccgtctctactaaaaatataaaaattaactggacatggtggtgggtgcctgtaatcgcagctacttgggagactgaggcgggagaatcacttgaacctggaaggcagaggttgcagtgagccgagattgtgccattgcactccagcctgggcgacaagagcaaaactccttctcaaaaaaaaaaaaaaaaaaaaaaaagtgaccaacctgctctatcagcactaacatggagtgatctcaagaacataaaggtgagtgaaaaggtaagtttggagcataaagaggctggggccttcagctttatctgtaatattttatttcttctgttgaaaaatagttgaaggcgccaggcgcggtggctcacgcctgtaatctcagcactttgggaggccaaggtgggtgggtcacctgaggttaggagttcaataccagcctggcaaacatggcaaagccctgtgtctactaaaaatacaaaaattaactaggtgtggtggcgggcacctataatcccagctactcaggaggctgaggcaggaggatcacttgaacccaggaggaaggggtttcagtgggctgagattgcaccaccgcactccagcctgggtgacagcaagagctccatctcaaaaaaaaaccaaaacaacaaccacaacaacaaaaaatggaaaaatagttgaagtaaataagacaaaataatgacaatatcaattctgagtgagggggagttgggagtatttgatatactattctcaagacttttctgtattaaaaaaatcctcaaacactcaagaatgatcaataaatactaaaaaaaaaattaaaaaaatcctcaattaaaaggagtaattgatgtgcagagattcccaaaatatactggataaccagatattttttttgagcagcttccagatttggacttacttcccctccatcaaagtttatattagttcatattagtggagctggctgaccttcccttgtgaatatgttttaaagattggattaaatatcaaggaattgggccaggcacagtggcttatgcctgtaatcccagcactttgggacgccgaggcaggtggatcatgaggtcaggagttcgagaccatcctgccctacgtggtgaaatcccgtctctactaaaaatgcaaaaattagctgggcgtggtggtgcacgcctgtagtctcaggtacttgggaggctgagggaggagaatcacttgaacctgggaggcggaggttgcagtaagccaagatcacactactgcactccagcctggcaacagagcaagactctgtcaaaaaaacaaaacaaaacaaaacaaaaaaacaaggaattttgtaagttcttatttttagccagtgaaatgaaacatctctacaaaatgtaaaataagtgcttgagttgaagcctgtctggtttgctctacctatgatcccatccagaaacctctacaaggttattctgggcctggggtgggggaggtgactcactgtgtgcctccctcgccccaccccccacctgcttaatcaggtgaaatcaggttagaatgaatattaagagcctctggaagggaagagatgtcagagaggagtaccctgagagactgccttagaccagggatggtgagggtgagggtgggggtgtggggacatgctggcttcttttttgtttttttgttttttttgagagagttttgcttttgtcacccaggctgtaatgcaatggcctggtctccactcactgcaacctctgcctcatgagttcaagagattctcctgcctcagccccccgagtagctgggattgtaggcatgtgccaccacacccagctaattttgtgtttttagtagagatgaggttttaccatgttggccaggctggtctcgaactcctgacctcaggtgatctgctcacctcagcctcccagagtgctgggattgtaggcatgagccaccgcacccagctgacatgctggcttcttaattagggcccacaatgatttatggagcacccagtttccaggtacagcactcacgttcacaggccttcctttgtggtctcatagaagaagcatctagggtgaacgtttgcaatatttttttatgctcccattttgacaaatggaaaaaattatttcctgcttttgacgttatctgaaatgtcaaaataaagactgggaataaggacattggatatgcccaaacctggttgagagtctctgctctagactgagcttctcaagtgccagtactgccccgaaactctcgggtgtctggcaaatctggatttgaaggctgatctgatcacttgtaggttatggacctcaggtgagcttcttaccttctctcagcctgtgtcccccttctctggaaaggtgattatgacacctgccacttagggctgctttgcagattccatgaggcacttagcaccactgccagttacataaaaaaacaaaaacaaaaagccctgaaaacttcaatcctaataatggccttgggaggtagactaacccctatgccccccattttatagatgagaatactgaggctcagatatacagttcaataagtggcttaacctaagcacagaccagggctcactgccaggccttgtgactccaagtcagggccctggccatgtgtctacaggtgagcaggagatttagagtcaccttctcccctgcctgagtcacaggcagggccaggagtgatttgactcacgtggctctgcaggactccttgcatctagtttccttagcgctaggtaagcaagcgccatattgaacagcttttgtgtgttctgtggactcccttcagtttctcttttgtccagttggcccagttggccacaagcttcgtttcagagatgagaccaagtctcctattccttctcaaacagccactagcctcagagaaatcgcctgtatatcgcctgaatggctttttttctttctttcttttttttcttttttttgagacagagtcttgctctgttccccaggctggagtgcagtggtgcaatcttggcccactgcaacctctgcctcccaggctgaagccatcctcctgcctcagcctcccaagtagctggtatgacaggcctgcaccaccacacccggctaatttttgtatttttagtagagacggggttccaccatgttggccaggctggtctcaaactcctgacctcaggtgatccacccaccttggcttctcaatgtgctgggattacaagcgtgagccaccgcgcctcgccacgcgaatggcttttaatggaaaccttccctgcagtctctcatttgagctttaagtttcaccatccaactttttaccagattggcaaaaaaaaaaaagaagaaaaaaaaaaggaagaacctaaatagacttcactgtttccctaagttccttacagctgtgcccttcctctggtcactgaacctgtcaacctaagttccctcaaccgtaaagtgaggacattaatattggccctgcctgttctgtgcatcaaaataaatgagatgctgtgtgggaagaccttttgcaaactttaacgcagttttcctcctctctgactctctctcctatgatccagcctgaatctattccttcctcaaatgagaagtaggactgagtcttctgttctttgcaaagcatttctcagcacacctgcccagctgcatgagctgagaggaaatcagcatattaaggaagaagaaacagtgcctcctgctgaagactttactgcttctagcacctgttaggtaaatctctgtttattgggttccaagctaaattcactctaaaagacctggaatcttctctcttatcagttttcagcaatgaagttttggttgagacactgaatgtacctaagcctcatttttaaaatgtgataatagttgccttgctgcgttgtcatagcatattaggacatgttatggtcggcagtcaaagcacgtgactttttcctgtcccactggacttttctctcccttcagtttactcttctttttttttttttttttttttttaagacggcgtctttctctgtcttgcgcaggctggagtgcagtggcaccatctcagctcactgcagcctctgcctcctgggttcaagcgattctcctgtctcagcctccggagtagctgggactacaggcgcccaccacccacacctggctaatttttgtacttttagtagaaacagtgtttcaccatgttggccaagctggtctcgaactcctgaccgctggtgatccacccgcctcggcttcccaaagtgctgggattacaagtgtgagccactgcacctggcctagtttacccttctaaatctctgtgcctcagcttgcttccccataaaatggggataataatctctggactacttagctcacagggttggttgtgtgactttgaaataaaggctatggtggggaactgaagatggcgaaatgtagtagcaatgcctcagtggggttatttgctggcctggggctggtgggtcgtgtgctggttctcaaaggcctggcctgttgtctgcagcaaccacgtttagaaggtcccttagcatagctgctcttaccagctcttcctgaggcccctgacactctcccatctccctgcaaggctctgcggtctccttacacctgttacccccatgcctcgccctgtccgtctctcttagtccccctctagatcacaaggcacaggaccattcaccgctattctctggatacagaaatggtgcctgccccaatcctgagggctgtcagaagctgcccatcacatgacacgctcagccccactcccccagctaatcctcatgaataaatactaaaaagactcattatggagagataaggaaaacaggaagtgcttctgaaagctcccaacaacaccctccctccagaccagtgaacaaccccaccccctccagaggccaccagtgtctttagcaacgaggccccctctgcggttgaggaagagcctctgtctctcaaacccagaggggactgtggggcctggagccgggagggcaggccagaggcaggggagctgagttgctgtattctgggcacaatttcaaggccagctgcagggagaacaagcagtcgctgtgcgcctgcagctggctgtggttaggccagggctgtccctcacttgtggtatatttaaagagacctcaccagacggctgtgccaaggggaaaaaatgcacacatatccctgttagccacactcggttcccctgccaaggcctctcctccttcctcagctcccagcactgcgttcacacgtcaagagaggaggaccggcttctcagactccctgtgtgccacctggggacacacaacctggcgcctggcctctctgccctcttaccaagctggccaaaagttcaggggattagccagatcggcgcctcccaccctggcgttggtaacccagcaaccgaagaggagaggcaggcagatgagtcaaatgcagccgcacagaacctctggcttcgtgttttgtttgtgaaaactccctgtgagtgaggagcacaggggcccttccggcagggaggggcagggctttcctacaccactccaggccacaggtgcctcctccagggaggcccaggccccactggactgcagtgcgggcttagaggccaagctggtgggccaagaggagcccaccctggctgaactctctggctgcctcttccacttattttcctcaagtgaaaagaagactacgggcctaaatcccacgggaaggtaggcctggtagcaagaactctgggcaagagaaccaatgggcgtaaagtcccacggagcaggtgtgcatagaagtttgggctttcaggtggccagacaccaaggagctgtcctcatggcaatcaatgagagggcttccggagcgaagcccagccaacgtggggtgagagggtgggaagtgggcagcttatcaaccaggggaggggagccagcaggcagactgtctgaggcaggcccctacaagtgccggaagagttagtgaaacacaagtgcaccaacaggattggctacataatttgcggggcctagttcaaaatgaaaatgccagcttctttgttagaaaattatcaaggatttcaagacagtgacagcataggatgaaatcaagggcccttctaagcacaaggacattttgtgaccacacaggttgcacacccacaaaactgaccctgggtacctgtgagtcagctcgctgaagcagatgtgaaaatcaaggcaggtcagctgggggatgtctggctgcagcccctatactccccacccctgctgccctgtaacaccagttcccagacttttaccaggcttgggacattgtctctccaacagcagcccctctccctgtgctgacggcaatggagactttatctctcagaaaagagggaatcgcaaggccacggtggaaggagggctgagggctggaatgaagtgtggctctgggctctcggggcctctgagtcccaaagccccccagggattctctagacaggccactggagccttctgagtgagcgtatggaggtgttttggaacaggatggagaaacaacagagactacgctctgggtcacctcttaaggtcccaagaggatacatcctgtgcatgtgtgacagtccaggagcagaaccaagatccaggaagccttctccccacttgggaacttacctccaactcaatgtggtcgtggagtttcttgcaggtcgctgcaaaagtctccgaggtgccaaattcaaagtaccacagcttgttcttcatcctggaccacaaagcagagagatgtctcaatattccatacttgaaatgctcatgtaaaatagctatgttctttggattgggaggcccaagccttcagcaatttccccaatcttacattttcagcacttgttaatcagatgatcaaggaatagaaattttttaccaactgttcttgctcggaacttagagaaaatccacttatttcttagacatcacggcaaccctgggtgaactaccaactgctccccgagtttcctggtcagaacaggaagaaggtctctgtagctgcattaaggaaagagctctacgagaagtcaagccagaggtggcaaatatcaatacagtgctctggccactgtcctttccattactcaggcagaactctcttttgggtatgtttggggtgtaaagggaagatccttctaagacttgagggatgtgcagtcttaggacagaggagggatagccccacactaacccagctaaaatgtgtgctgcattgcccaggctctgactgggggaagcagagtggcaagaattagatacagacttgcaggcaagttggaaaaaaagaagagttgattggtagcaataatcacctcccctcttcctcaaatgtatttgcttaggccatggcaatccttcagttaagggcaagacttgtcatatttgcttcaaagtaagagttcactactttgagctttaaaaattttcagcattttccttgagagaaaaaaaaaatcaatcaatggggttcccgtgtagctgggggctttgcaaagtcagatggtgtgtcctgacacttggtgcttttgatcagatggtctcactgggaagtgtttctgaaggtattccattccttccaccccaactgtcaccccattatcaggggttggctaagagaagggacacctgtccagtttacgagctgacagattttgctaaggaaggattaaacaaaatcacattcttcttggcactcagaagagaggatgccaccttgcatggcgctaatcctctctcctcaggtttgcagatgaaggggaaaggagcagtcttcagagggaagagggctcttattttttcctcatgttccttaggttgtagcagatgactctccagaataatagacacaactcttttctgcagatttccccaagagtctacctagaacttgaagatgaaactgtgttcttccattgtatgaagacttctgagatctagttggttgggaaatagcttctctgactcttagtatgcatgaaaagaactaataaatgatgaagaaagtaagagtaagcaagctctgggaattatgcctcatgaacaaaattagaagagctgggtgtactgtaagcagaccggtgcttctcaacccatgtgctgtggcacaggcgtacctgggatgtcagtctcctcagcctgcagagcagccaggtgggatctgggacaggctgagccccaatgccatggcaaacattctcatttgtattcccagtgtgccacacatagattttcattttctatgcatgccatgatgatgtaaaataattgggggaaacattgttctagatgactggttctctgcatgcacagtcatgtgcatatctaatcacttggggattttatgaagatgcacattctgattcagtgatttagggttagggcccaagattcctcatcttcagtgctgctggtccaggggatactgtgagtcatgtggatctggagactatgcctgtggttctcaaacattggtatttataagaattacctggggaatgtgattaaagtgctgcttccagggctccaatctgtagagattctatgagagagttgtggaacggggcccaggattgtgcatttttatgtgtgtccaagtgatcattatgcagatggtcagtggacaggacattgctgtagatcccagtgaaatgaaaacatggaaaaggacagaaccagttaaacctgaaggagagaattctccagggaggacagaacgagggtcagtgcctttccacagtcaatgatggcaaaagactaagtaacaggaaaaacacagattgtcataaatgtcaaagctgagcattcctttttggcagcaagagcatctttgtagccaggagacttgcttgtgattccattttcaaatatcactgctggcctgaatcatgacttttgaaagttattgccaggagatttagagtttcaataaaagtttccggaagccacagctatttttgcccagtagtagctcttctgatgagctaataaaggttaagaggtcacggttaggtcagcatcgcagaataactgagaagatcaaacggactactcattcattgctggctgtgtaacctttgacaagtgatttaatgtttttaagcctcagtttcctcatctctaaaatagagataagaaaaatatctgcttcaagaggtagttgaaaagttaaatgagataacagcaaagcacttcacataggattgctgtatagcaggctcatcaagaatgccagctacttacttattagctattattatttcagtgtcttgagctggcatatttggataatatagtgaggcaaaaatgacagataaggatgtgtagctatagatattatatattaatatttttctgggcaagaaaaaatgtgatcatatttattaaattatgtgtcttgatttttggtgaaaaaaatatgctccccatatgtccttaatagatttttccagagtcataccatgccctaatccttgattaattatcttgactggtcacacaattggccaaagcgatgctaattgctaatatacttcggagaaagtgcatgtttggtgtgagacaaagtattcatcaattcaacagacattcattgtgccagggactagagaaggtgtgcctggtacaacaaagaacaaaatagcattcctggacatctggaaaagacagacaggaagcagaccacagtgtggttggccaagaaccaggcaccagagttcatagctggagggacacccaattcttagaaggatgtagaaggcaaacagggaaggtggagaaagagcatttcaggcaaagaaagaagctaggccatgggacaggcaagagagagaatagtcttgctggaggggacacagaactcaaggtagggcttggctaggtaaggctggaggcagacaggagcaagactgtgaagggtgggcacgccacactcaggggtttgtgctttatcttaaaatctggtggggcgcgacggctcacgcctgtcatcccagcgctttgggaggcagaggcaggaggatcacctgaggtcaggagttcgagacccgcctggccaacatggtgaaaccccatctctactaaaaatgcaaaaatgagccaggtatggtggcgggcactggtaatcccagcggcttgggaagctgaggtgggagaattgcttgaacccgggaggcggaggatgcagtgagctgagaatgcaccactgcactccagcctgggtgatagagtgagacccccatctccaaaaaaaaaaaaaaaaaaaaattctatagggagtcatggaccatcctcaagtggctggggagggggatggggtgatggtagtgacctaatcagacttaggttttttaaagatcattctgttccatgtgtggagaagggactggaaagagaggtacagactggaagtttggaaaatagattggaggtggtgtagaaatccaggagataactgggaagggcctggacaagggtcatgacaatagcattagaagagaagagtgggggagactcacaagctaaaatttaggagttattttagcttacggaacaaaaaagaggggtcacagtgatagccaagtttttgtcttagacagcgtgatagatgacaggtgccatttcctgagagaggggcacaggatattgatttcccagtggcagtcgtctttgtaactgaaagacagcacttttgtttttggttaatcttttcattcatccatccatccatccattaaacatttatggacccctactatgggccaggtgctgtgtagggcttggagataagtgatgaataagacaagcaagacccctgccccaccccccaaacccccattatttggggggtggggcagagtctcattctgcctcccaggctggagtacagtggtacaatcttggctcactgcaacctccgcctccccggttcaagcgattctcatgcctcagcctcctgagtagctgggattacaggcatgcgccaccactcccggctagtattttgtatttttagtagagatggggtttcaccatgttggccgggctggtcttgaactcctggccttatgtaatccatccaccttggcctctcaaagtattgggattgcaggccaccgcacccggccgagcttatacacttttaatagcatcaccaagacctaagattgaacctctgacccacaagggacgtggcttttagatatgttcaaaatggaaatgcttctatttctcctcttttaactcaggcactttttggctagaagtgaatgcattctattcccatggccctttggttttgcactctgctaaacattttacacacaccatctccttcagttctcagaagaagcttacaggtaggttactctaagatttccttattgctacaaataaggacattcacagatggaagtgaattctcctctgcctcgtcttccttttcctttgtcaacaccagcacaccaccaccaccacccatttccaaagccttcaggaaaagcctataggcacgtggtaccctacaatttgagctgggagatgcagcccccactctccctgactaccagagagcctgagtgcaatgttccttcttctcttttgaagctatctcccctcctactttactcttagcccttgttggaggaccgttgctgcagaatgtggcactgagcttttgtctgtttcatcttctattgtacaagaatatggcatctgagagctgagaggctagggttcatgactggctttgccactcactggctgggcaagttatttaaattatttgaaccttcacttcttctacaaaatgggaacattattttctactcacaaagttgtgaggcttatgtggcaaatgcaaagtaccaagcaggtgtttaatgcatagtaagtgctcagtagctgttcttccttgttgctaggagacacaatcactggaagaagacgcattccccacaggctgcaggggtaagggtgggtctactgtggggagtctatcgtaggtggcccatattttttgaagaaaataaaactaacgatgttttcatggctgctggaatgctttttctgcatctctcttcctgagtagtctttggcccaccatttttttttcccctcttacaatcacctttcagctggagatgactaatccttaaccagctgttctgaggctgatttccagttccatgaaactcctaggttcattgtcaggctctgaactatccagatgaacccattcttgaggcagaagatcctcctgtgtgctccaagggactctcagccacatggagaaatggcaaatacaaacagtgacaccatggctcaactctatttctgggttttcttaattgccccctggcttataagaaaataacatcaattgcacactagctagttgaatcttttcattagacagatgagagaaaaaatgagactaactaaaaatgttcttttatgtttgtcagcaatttagggctgaaatccatcatcctgacagctatgaatagcctgttttcaaggatgtccacagtgaaacccagctagctgctggccattcactttaccagcagaggctacgcactcagcttcctatgccaccctgagcttctggggaccctttcctgagaatcaaggaagttttaagggcattgggcttttgaagttgtcaaaacatgaaaacatttatttgggcttagaagtctacacagagaacactacagttatttctagaaatagaagcccttgaagtgaaggtattcctctttgtggtttggactttgataatcaggttctctgagtgactcataactcacatagttagttaggccttgggtgtcagcattagattgggaggcctggtgaaacagatgctacccacaagatggtgttctgtatggcatggggggagggcagaatgatttagtggagactgtgctgcaccagcgggcagagctgcctcccagaccccattatcaaacacaccagcatgtgacttcatgagagtcactcagcaacaccaggcctcagattcctcatcttaaaaatgaagggcttggggccgggcacagtggctcacacctgtaatcccagcactttgggaggctgaggcgggtggatcatgaggtcaggagatcgagaccatcctggctaacatggtgaaaccctgtctctactaaaaatacaaaaaattagctgggcgtggtggtgcatgactgtaatcccagctactcgggaagctgaggcaggagaatctcttgaaccagggagttggaggttgcaatgagccgagatcgcgccactgcactccagcctggcgacagagcgagactccgtctgaaaaaaaaaaaaaaaaaaaaaaaatgaaagactcggaccaactgctttccaaggtttctccaagctccccagacaacttgagatgacacaattcagaacaggatgggaggactcacgtgttctacaactgctgctgtgtaggagtgtgggcccaagtattgtcagaactgacatttttgaaagagaatccagaaatatattttcatgtaaaatctcctgattattggaattggcaactaattcaagtttttaagaacctaagccaaaaaactacacatttgggaaaactgtagctagccaacaggacatttctgtatatgaattataaattttcatcaggttcatctcaattaaaatataaaacaaatgatctcaatcccatttgggatttgctgggttattagcggtgttattgctaccactactgaagataatagactagcattggattactaaggtaaataataatttagcaaatcaggtataacagaaatgcagaacggccaaatgcaacaagagttgaattataattgataaatattagtaataatattgacagtactttacctgttaacattttacattacttgaatctcaaatacctttggaagcttagtgattatgttaaccgaagtttacatcaagagttaaaaaaaaaaaaaaaaaaaagaaaagcaaaggcaggtggggtctgctctgaggccaggatgtcaagtcctataaggggcccctgactgttacctcacaggtgctgcagaggccatctgtgtcacccgcacacccagctgccttggcccatcagagagtgtgtcaccacatctaatccacgctgcatgctgtccccagctctcactgctcatcagaacaggcacgcagtgatcctcaggcaccgagctgtgcatggaatcatcttttccaagagggggcagtggcccctttggttcaagggaaagtgaacacccaaaaatcaggaaggaggctttataaatagctgtttttgtactctgaatgtgactcttgtgcctgctgttcctgccaacagatttgtgttggctcgatgtgtttcagcttcaaggcgcgaggtattccctggcttgtttccatacttgggacaagactggtgttcatggcactcagaaaaatctagggtggtgaatgatgggaagactggaggccagagaccaggaagagtgggcagaaagatggagaacaggaaaggggagatctcaagaaggggctcagaaaaaaaaaggctgaggaaggagggagaaacttgagtaggatgtattttattgtataactatggaatcctcttaataacctctgaagacacttcttgagtcatttccatgtgtgagaaattaactgtaaaatcacagatgacatactgtttgcaactaagaggtcttcagggttcagggacttattatagccaggggatcacaggttccaaagagttcttccaaagtgtaaatggagtccaggagctgctgtcaatatgtcttaatgtaaaatagtatttgtgcatttaatcataataaagacagcataggctaactagtgggttaaactataatttttttgatgtgcaatggaattaaatcagttatatcagttactgcttggtaaccagagacacggattgaatggcaattgaatcctgaataatcaaaatggggaaacaaatgattacttagaagagctttatggctgaaaaaagtcttactcaatatggcacccatggtgggaggcagtgggagaatgaataaaaatagtgcactattccatagtaaaagggtacatgtaaaattactactctataccagggctccatggtggttctcttctaagccatggcagccttctcacggtacagcttaggaaaccgagatcagttcttggtgatgcagctgggaggtatggagctggaatacaaaccccgtcttccagcccatactccttactggtttactctccctggctcctgttgctatgccccagaggcacctgagagaaatggaaaagtcaaccgaagtcaccagagctagtgactgcaaagctgtgagtcattctcattcatgcctgtgagctgggtttactcacatctaccacatgcgccaccggtatggctgtaggatcccagcttgaggttggctgggaccctgacactctttagcagagtccatgatctgggcctccccattggtctccagtctccactcttgtcccagagtaacaaagggccaaacccataagcctcatatttagagcagcctctgtaccccttcaagggtaattctgggcccctaagaatctactgcctctgaacagtgacccttctcttccatataagacagtgtgtttctgcggaccaaggacacattctccattgataggatctccgaattctgtctggcacctgacagtatctcctcctaagggcaggactccaagcacgaagattgccaaagtctgaaatcggatcctttcccagtgcagcacacaaggacacacgtgtgcacgtgcgggcacacacacaggccgcaacaagaaggcttccctgagactcatgatccactgttaccaaatgtgctcgcagacactgcccctctgaggccagagagtctctccaaaggcccagcagcctgactggagaatggccactgtgctgtgaaaggcaccactttgggggtggccctcaggggagaatgctgaggggcaggcaaggccaggaccatgttgtcagggttttcctttcctgatggcctgggtctccagggtgtttttccagttagtatctgtccttgccaagagaaaatagctcctttccctcatccaaaaagaaaaaagaaagaaagaaaaaaccctcacagtttggctgcttcttagcaatcctttctccctttgaagagttattcgtggaaagaaaatccccttcaggctgatttggcggagggtggagggcatggaataagcttgctcttggcagttaacggagagcaaagtcaaatactgggacaaaaagaaatccctgcctggagggacggggaaaaggcggacaggaatgctcactcctgaggttctgtagtgattccttagctgtgctttccagcatttacacatccatcagccctgggaactggtatctgaaggcggtggggacagtgaagatacaggtgggtgaggcctcgtgttagaaactgagccttgaaggcttagagaaggtggctgtcctgctggagctgagcctctcgctgtggaaggtgacttcctgggtcctgatcaaccaagactaaaaggtggaactgtctggaggagcagaggcaaaccctggaagcaggtccacaccctcacactaccgtgaccgccgggtgggtcctgagggagccagctgagctctgccggcccccagctgttgagaggaatctcacttcccacttcataaatgttgaccgtgggtctgacctgcactggctgctttatgcacccaagggtcgcgctcttttgatcctcacgtctaccccctgcggtaggtactatggtggctatttgtagacgtgtgagatggttgttccttggcaaacctacagctagactggaacgggatcacagagtctgaggggatgcaggctggctgatcctgttctcccctctcgctccccagccagtctttctgaacacgaggcagtgcctgctttatgataggtcgggttacaaaagttccttggttaagccagttgtttgtcactctgagcacatttccccatagaaacaatgtgatgttgaggttgggttcccaggctaacccacaagagccaattaacccattaggtacccaaactacaatgtctcgttttagagagagcttactggagctgaaggagttctggtgggaaggcagaaaggcctgggttcaagccacagttcagtcacttacctgccatgtgaccttgggcaaatcatttagtctgtctcttagtttctctatttttgaattgacacaatatgacctaccttgcaggggttgctggcaatattaattaagaatacacacacatggtcgggtgcggtggctcacgcctgtaatcccagcactttgggagactgaggcgggcggatcacttgaggtcaggagtttgagaccagcctggccaacatggtgacaccctgtctctactaaaaatacaaaaattaggccaggcgcagtgggtcacgcctgtaaacccagcaatttgggaggctgaggcgggcggatcatgaggtctgggagttcaagaccagcctggccaatacggtgacaccccatctctactaaaaatacaaaaattagccaggcgtggtggcgggtgcatgtattctgagctgcttgggaggctgaggcaggagaattgcttgaacctgggaggcagaggtggccactgcactccagcctgggcgacagagtgagactctgtctcaggaaaacaaacaaacaaacaaacaaaagaatacacacacgtgtatgtatactatatatatatatatatatatatgtctcatgatatacactccaataaaggcacagtagaactccattgttgtatataaaactggcttcgtggcctcatgattctgagttccaacttaaagtacagggagcacatcttttccgctgaattgggattggggatctttgctttcctcaacttcctgggaaagaaacctggagactcctctaccctacatccccggcggtgaccctgaagtctgggctggagttctacttaggaggggaatggagacgccagagggagagtgagaagcagcagaagtggaaagggtagcagagagcacacactgaagtatgcatcctgtgtcttccttttgcaatcctaaaactctaggatggtctggttatttctgcctatgtttcctgtgccttccccaccatcggctggttagaggcatcttgtctagaattaagtccacggtaagtcgctccctccttgtttcccttacctttcccatcatgaaattgttagcaaggcaagtcaaaaatgcactcgatagggcagatgcctggataaataccccccttctcttccctattccatcttcttcctgtgccagtttaaaaaatcttaaataggaaagcatgagccagagcctcgctctgcctgagaagactgcggtagaccctgccagcaaaatcctttctatttcatccttttgaaaatctcatccatatgctctctactttgcttccactctgacgtttgtgacttcttattcttgtgtatacatccctgccacccatttcagagactgcaatttatgtgaacttgtcatcctcacctggcctggtggtgcagctgtgtgtcctgccccaccatgtctctgactgcaatctctaaggtcgtgctcctctcccctaaggaatacgaatcattcagtttgcccctctcactgtgtggttggcaaacttgtcccagctgtaggtgtggccccagtggtcctcccagccagttccttgggagagctgcttggcaccaccttagccacgcctcttatttgtagcttgcacctgctgcccttctgtgggctgtgattttagagtttaatttgaacactctactttatcctacttaaatctcattttaaagctcttctgtttggtcctcaagtatctggccaaaaatattccgcttggtttatgtgataagctcccaattccttgccagggtcctcttattccagcatcaaaatccatggtccagaagaacagtcgttctcagatcagctacagagcagctctgtgttccccatatgtgcctgtttcttctaaaattatgactcacggctgaggaagagactaaagcattgcctttgcccatgtcccttagcttgctacccaagacatcaaaggtcactagagatactaaccaggattcctccaaatgtgtcatttgccaccatgcccgcaggcagacaggagaaagagtctgtaagttatatgagtatgtgcactcgaatgcaggggctttcaccaatgaattcggtaaaatattggtctcaagaggctctggggtaaggggattctgtggtcaggtaaatttgggaatgaaatactttctcttgcttttgcatgatctcagcaggttagaatctacattaaaagctctacaatatcaaacagaaaagaattatgtttgactcaattttccaagtgtattcaatgattgacacccccccgccccccaatcttcttgtgaatttctttttaacatcctgtggaaggcattttaaccaatgctacatactttaatacatgctggaagaagacaatctgggtagctacctctgcaggctcatgaggagttgaacctcatggtaagtctgttagctgctgtgtctcccttctccagaaggtccaaatttattctccttgtgcagagactatacttttaattttttctccaaacaggaattgggaatttcctctttatttccatatctatttattaatcagagtgacttctctttatgttctctttgtccccctgagtcccttttctttctgaatcatttctttctttttttttttaatgtattttatttacttattttttttgagacagggtctcactccattgcccaggctggagtgcaagtggtacgattatattaatagttccctgtagctccaaaatcctgggctgaaacaattctcccctctcagcttcgcaaagtgtagggattacaggcatgagccattgcgcctggccctgaatcattttttttaatgacatctaggaaccctttgtcaatgctttaaaattctcctcaagcccattcattctctcctttggcaggagatcagttcacatttatagcaccaataatttgtgaccaaggtcaagcaagaaaaataaataattggcccccatcacaaccctaaggttatatttcctggacatcaacgtgacaagttggagggccaaggctcttatggggcctggcaatgtgtttatttggcttgcatggtggtgtttaaaattggaaaattttacatacacacctgaagcccagcttctcttgagaaatcagatctgttaatactggattgctttccaacctggcaatgatcgacggccactgagaactggctgctccctttacacagcactcaggctagagttctcaccactccctaaagcctcacatctacccacttctctcatttacatgaactgcctgcctctgcatgcgtttggatttgtgacccctcatatagaccgctgtagttttcccctgggaatttccctggacgatgcttcaaaagtgtctccgctactttcttcctcagatccttcctgtctgagctgctggtgtctttggttatgagtcctaatacatgtctgatttcaagggctgaccagctgcagcagggtgagagatgaatcatattggcatttgcaaagatcacatgcacagaaataaaatatcatccaaatctacctcttctgggaaataatattgcagttgctctgtgtttggaagttagggcacaacctggtagatagatcaactattccacaatcatggaacactgagaaatgaacttgactctaactactagaaaagtagcctaagctcacatttaccttttccctgaactcaccactttgtacaaaccatgattattgtgaattttaagattataccaccaaggcttgattattaagggacaaattctttagtaagtagataatccaatccttcaaatttcttcttttctaacccatcagctgttaaccatttcatttttctttagtgcaatttttaccagttgtggagatggggccagagggggaaatgtgtacaaggcatgaaccagaacgtcagctcaaatcagagggcatcccgtggtgttatctccaccccaaccctgcatatacagaaaccgtgattatgagcagccgcttcccctctccccacccaagttcaggggcaaggtggtacagaagaggaaagggggaacctgactaattacaacactctgttgagagctccaataaaagtttcactgagatcaacagtttgcagttttcatttacccaggactttctcactccctcttactctgtggtaacccaaaactggagattacagacccgctttcagcttattgagttcaaaggcaaggtagggtacttggcttgattggcagtttggaatgctctccaaaaaggcccactttcaggattaaagggacactccatttaacagaatagaaaacatcttgttactagagagtgaagaatttcaatctaagtgtaggttcaataaacatgaatattcagcaattacgtaattccctgctgtgttagtaatttgagggtataagtacattcttgaagtgagaagagcccctctttcattgaagagcattagaagattgggaaaatgccttcttagtaaaatatgaagtggtaagcacctcctaaccccttcaaatttaaacactcctacaatcttcataatagagatctacagtcttcaaagtagagatttgatgaccccctttggaggagcgtttatagaggggatgcttacactgagaagggggttgaaatctaaagtcccatccaaagctaggagtctataagttactattacagacaggaatcatgacagcatgcctttaaattagagattctacaatggattctcatatactgctgcatgttctccttacaaatccctgtagtaatcaatacagcatcataccaatacctgataaacttcaaatccattgatttatctactctaattctcacaggcaccttgtcaggcagttgtaatttccattttacacatcagaacattaggaatcagagaagtgagtaactttcccaatggcacacagtaagtaagaggcagagtaagggctgaaactcagttcttttgatgctgaatgcaatgaaactcaggaatttgtgtctgtatttcacatgagggtgaccacgacctggcatagcagagttgtaaagccatttgttcagggtttctgtgaaataatttactgtgaaataagtaaattatttcacagaagagagttactgcgtttcctgataagtacagtgaaagcttgcttttgaaatttcctttggcccaataataagtgcattacaacgttttttagtaaatgttgatttaagtggggagttaaaattaatcacttgaatcttttttgagaacatctattaccttttcaccttgtttttcaatttcttcataataaaacgcatgcaattatgaaaagtttaaagaaaatatgggcgactgaatatgctaatcacatcagccgtaaatacagatacagactctgttgtatcaccaaaatacccttatgcaaaagggcaataattttccaaaaatactcttatgcaaaagggcaacaattttctgaagttttaattagtaaagtacaatagaaggccaacaaactctgacattattttttctggagctaaaaacaaacaaagagacatgttaaactaactttaaaagccacctaagttgccctctccctgaaggcatctgaaattgtggtggtgaggaagagagaatgacatgcggattctttttttcaatatggatttctacttcacaaccaaatagcatgctttaaagctcaaggtttataagaaagctctgtcgttggtttccatagtttttccagccctgatgtgtactgactcctccagggcagcagagttggctccttctcctctctcctgatgcccctcttccttctctctccccctggggattgcctcttttctgggtctttctgactaacactctgtctgtactattctaacacttcagcaaggttcagtattttaaagtcccagtgtttctaggagccctgaaatttttgctccacaaatactttgaaaggtaagccattccttcattaatctgttcaaaaagcacttactgatggataccctcactgtccactcacccactcctaggataagatgcaaactctggtgcagaccagcgagatctgctgcaactgctccccccgccttttcactccacccgggaacctccggcctctccgctcatgtccagtgtcctctcacacttcagcccttctcccatactgcttccctcctcctagcatttccccggttgcttctctccttggcgaatttccatttctgtctccagcgctcatgcaaatgttaccttcctcctgaagtttcatcctagtctctcacaacaccctcattgttcacgtcccttcgtgaaaacaaagctaccatattacattgtatttccttcttgtgtgaaggtctgggggaagactgatgctgtgggctgaattgtgtcccccccaaaaatgatatgctaaagtcctcactctctatacctgtgaatgtgaccttatttggaaatagggtcttcgcagatgtcatcaagttaaaatgaggttataccgggttagggtgggtccaatccagtgactgacgtccttataagaagaaggagatttgaacagagacacagatacagagggagaaggccgtgtgatgatggaggcaaagatttgcgtgactgatacatctacaagctaaggatgtcagactggcggcaacctctagaagcaaggagagaggcacagaaaatcattctctctcagagcctggggaaggaatcaaccctgctgacatccttcagacttgtagcttttttttttttttagatggagtctcattctgtcacccaggctggagtgcagtggcatgatctcggctcactgcaacctccgcctcccgggttcaagtgattcgcatgcctcagcctcccaagtagctgggattacaggtgcccacccgccaccatgcccggctaatttttgtgtttttagtagagacggggtttcaccatgttggccaggctggtcttgaacacctgacctcaagtgatccgcctgcctctgcctcccaaagtgctgggattacaggcatgagccactgcgccaggccagacatgcagcttttagagctacgagcgaatacatttctgctgttctaaaccacccagctgtggtgctttgttatggcagcccaggacactgatatagttggtattaacttctgtatgtgctcatcttcccagttatacccacgaactcctgaaaagcaggggctgtggtgctccatcgttcctctcagacctagcatgatgctaacacaaatagatgctcaactcattttggctgaatgaagaaacatgcttagcatcacccttctggatttagttcagtggatcctgaagagagtcagactcctctccgagtgagaaagcttatgaacaagttggagacataacagtagtttagcatcccaaacaatgaattatagaagacaaagagggtgcagcaaagtgggacagaatgtgtcaaaaacactggagatgggctgggcgcggtggctcacgcctgtaatctcagcactttgggaggccgaggcgggcggatcacgaggtcaggagatcaagaccatcctggccaacatggtgaaatcccgtctctactaaaaataaaaaaattagccgggtgtggtggcgggcgcctgtagtcccagctacttgggaggctgaggcaggagcattgcttgaacccaggaggtggaggctgcagtgagccgagatcacgccactgcactccagcctgggcaacagagcgagactccgtctcaaaaacaaacaaacaaacaaacaaacaaaacaacaacaacaacaaaacattggagatggagtgtaagagaaagtggagtaccaaatgggttggttaagtaggttcgttcagaatattctgtgctgcattttgaaacaagtgatgactaggtcacaagaggagatgtcatctaggttgagggattgagggaatgagagcagctgtgtggggaaggtgagagtaacagagcaagcaagcaagaaggtgaggctggtgtttgaggaggagaatgttataaagggcgctaaatgcaagcatgggatgtaacgtgggaggggggtggtggaagtaggtgcttgtgcagcagcaacaggaccacaaacgtgtcccagggagactaatgggcagctccaggcagggtgggcctgaatgggaagggcatcgagatgggccagagggtggctgaggaaatcctgaggatggaacatcttggggaccaactgggaagtgaggagcacaggaggcaagcggtctcacaagtaaataaaattgtgcaattaaactgtgcagcttggtcagttgtggagtgggaggcagaaagctcccatctgggtggggacctggtgggtgcaatgagtacactgctgggctcagagaaggtggtgtgtttatcatcctggatgaatgcaactctctgtttttggaagcctttgcaagagattccaaaactactctcaataactcatttcagtctttaatatgtctccaggccagaagattcctgctcccatccaaaagagaattctttacttttagagcacattttttccctctctcattctttcctgaactgagatgaagagtaaggaggtgcagtcactatttcctgttgtgaatccttcacacacttgaggcccattcccagtacgttctctgtttctctccaggaaaagtgattttggataacttgtggttttctcatgggccctttaatcatatctatggctcttttctagtctttttttgggtgcatctttggtcatggggcacaaaactgggcacatggagaggcagggaattgtagcaggctaagaggagatgtggagtggacaggcctaggtgtgaatcgtagcttctctagtaactagtgtggtcttgagcaagttgcatcatctctatgagcctcacttttctcatctgtaagatggatcaataatacttacacttggtgagttgtgccacttaaaaataatgtacatgagattcttgaaagctctcaataaatgatggctactattgttggtatgggttggagcaggactgattacattgggaaaaccacctttctaaacactttaataaatgagctcatggttattcatgctttaaaaactatactaggccaggtgtggtcactcacgcctgtaatcccagcactttgggaagcctaggtggttggatcaactgaggtcaggagtttgagaccagcctggccaacatggtgaaacccgctctctactaaaaatacaaaaaaattagctgggcatggtggcgcgcacctgtaatcccagctaatcaggaggctgaggcaggagaattgcttgaaccctgaaggcggccatgtcagtgagccgagatagagccactgactccagcctgggtgacagagagagagactccgtctcaaaaaaacaaaaataaaaacaaaaactatactactgcatagttcagacagcaactcttgctatctctggtggtcaaataaaacacaaactggttcttttgagatacagcaaaactatagacaggacccagaatcgtgttgaaaggataaaatatttttcatttaccctgcacgatagtagagctgcataacatctgaaatagttatttcaattgtgaagggacttgggtaatggtatctttaaaacactcaatgactgaacaaaagcgttgggactttttaattggaaaaggccaataaaactcctacagcagatgaactcactccattcagctcctttctatcaccttcccttcataacctataaatgctactatgttaatgttttaaactagtgtctagagcatgatctcaagtcaataaaattgtgcaattaaaatgctgaaagaaaatatgttatagcgctgagtgtttatttcttggaggaggggatgcaaaatatgattttttttacaatgagcctgaatgacttatataaagaaaaattagtttaaaaatgatatgtatagctttataaaaacacattatcacaaatattttaaggtatatctatcaagttaactgctgtaatgcaccaaaatggcaatattgtgtttctccatgatgggaatatgagtgattggttttttttctcttactttaacttttctgaactttccaaattatttataatgatattgcaatgtgctatataataacactgtctgatgtattatttaattacatgataaatgtattgatattttattgaaaaacgtttaaacaagataaatgatgagaaaaataattccatatatttctacattgatgacttacaccctatttaatattaaatagatgtttatctgcctatattagagaatcaccaaaattcagagtcttaatggcttctgaatcatctaacatggttattatctgatgtaggatctgtctttgtaataagaatattaataacaatcataatagctaccactgatgtgcccgactctgtaatagacactttaaatgcattgttccaatagatcctcgaaataagcctatgaggctagtaggtggaacaatgccctgaagatgtccacgttctgatccccagagcctgtgagtatgttaggttacgtggcaaaggggcgaagggggaattaaggttgcagatagagtttaagttgccagtcaattgaccttgagatggggagaggatcctgaattttctgggtgggttcagtgcaatcagcgttctcataagtggaagagggaggcaggagaaagaatgtcagggggacgccatatgagaaggactcgactggccactgctggcttcaacaatgggagggggccaggagccaaagagtggtgacacctggaaaaggcaaggaaacagcttttcccccagactctccagaaaggaatgtagccctgatggcaccttgattttagcccggtgacacctatttcagacttccaacctccagaactgtaacacagcagtgccgtttttgtcgttgttgttgttgttttttgagacggagtctcgctctgtcgcccaggctggactgcagtggcgcgatctcggctcactgcaagctccgcctcccgggttcacgccattctcctgcctcagcctcccgagtagctgggactacaggcgcccaccaccacgcctggctaattttgttttcgtatttttagtagagatggggtttcaccgtgtcagccaggatagtctcgatctcctgacctcgtgatccgcctgcctcggcctcccaaagtgctgggattacaggcgtgagccaccacgcccagccagtagtgttgttttaagccactaagtttgtggcagttcatgacagcaacaacaggaaactcacataatattatacctcagttttacaggtgagccgactgaggttcagggagagtaacttggtcaaggtcacacatagtggttaatgagaactccaggatttgaatccaggttgtatgataatggaacctttcctactgggcacttgcttccaaaatcattgccagcatgggcttgaacgtaaaataggaaaactcatcaccttctccaatagctcactgcacttgaggatggctctgaccagtagaattaatgtcctatttggggcttaacccagtcttgcattccagtcaccttttcattgattaattgtgcaaaataacacaattcctgctttatacgaaaagccttttaaatatttgaggccaatgatcacttctctctaaggcttctcttctttgggtgaaacaattccagattcagccttttgctcgaagacatctaaagttccagcaccttctcaacctctcccttctggaaagcatccagactgtcaacactcacgttaggatccagccagttcctaccttactttgaatttgtgtgctttgattttcttccataaggttatcgtgctaacctcaactcttgtgaactgattacacattacatcttgagttctttgatggaaatatttctagaaatcaatcagtcagtaaatactgataactttgggattatctggcctatagtcttgaaaacatagcgtgctttcaagttccttctgatatgatcacaaaccgattctactctttgttgacatgaataagacctttcctgttctagcctagcaggggctacaagaaaaagcccattaagctacagaaagaaacggttctggccagtgggtaaccttgtagggaggcttgagacgccacaggctgctgctgtgtaacagtctgagaggttgtgctgtctgttcccacgcggactagggacccaggaggaaaatgaaaggattgttaagagtcagtgtgatttcatcatattatttaaaatactacgaatgttagggcagggagaactgcatacaaatattaataacagactcccaaaatctttgatcatccaccactgtagatgatccacgtggttgctcccttttttctgcgaataatcaagagttaactataaacaatccaacaacaacaacaaaaaaccctggacttctgcatttgtgtaacgttgagcacctgatgaaaaaaacatgaacccatatttcattcattttactctctgcatctctcccaaagagaggtggggagggtgggggacaaaacatttttgtggcttagtatataaacattcaagtaattaagtcagttgctctgtcagaattgacttgaaaatcaaaggttcttgagcacaaaacataaggtttgtatttctttataaatacctacaggaataagaaaaaacacagaaaatcccacaattaatttcatttggggcttttctgaatcccagatatttaagaaaaatagtttgctatattgagggaagcaggtgcagacagtctggacctctggctacctacagcaggtctcttttgaggtgccaaatattagatgaagagaggcaaagcctaattcagggcacagaatgaagactttgatggcaaggatttttaactttgctatatttgctgctgttgaacctttatgccttgagaaagtcacacatctgggttgtaatagtgggctacctcacagggcgccaggaaagaataacttagaagggtttcatttttagatataagaagaaaatcttatgtaaatcatgatatattttatgcttgtgacggcagagcatactgcaggtattcaagagaggaagcccttcctttcattttcagaactgtgtgacttgagctttgtcggtttctattttgttccccacagaacatctctgtctttatctgaggtcagggttggggagaggtacgtggtgggtgaggggaaagaagtatccgtgagggagggttagtcacatccccagcatctgaccacagggccacttgcctacctgccatgcagtccatgacccctgctagtaagccagaagcacccagggagcacatggaatctgtcctgccactctcctttactcactcctgccctgttcctcctgaggccatttcacctggggtctatgaccccctcccttgatcctgctagcctggatttggcactggacttcgaatctctagtgtccagatccccaacctctgcctcttggacttccatggagccagtgaaggggatttcctctagagcttctgtcctgtagaatccaaaccaaccaaagtggtgccatattcccacccccaggagaaggatttgggcagattcaatgcatcactgctggggtctcctccaacttttagttgtcctccaacttttcaggttaaaggccatgtcaatggagcattgattctgtgataactgaatccaatttgtcactccattaaaaacaacccttttattgtcaatactttatcgtcaatttaaggcaatgcttgttattcaatgatattcaacaacaaatgtttattgcgaacctcctgtgtactatgaacttaggtattatgtcactaaatacttatagcaacattgcaagattttcaaaagaggcagcaaaggattaagaagattaacttgcccaaggtcacatagctaataagcggcaaagccaagttttgatgccaacttactctataccctgctgccttcttctataaatagttactaagtgcttagttatttacaaggtatatttccaacctcttaaaaactcaagctacattagggcttctggggagcccctcatcagtgactccatgggacctgctccaagaaagctaatatttcagaacctgttaattagtcaagggcttttgagaaaggtggtcagcttctagtaggaatgaagcactgcttcggtccctctgaagggcctaacaggaaataacttgcttcagcctcaactgctgagagacgcggtcaagtggatacactcaacaggtttagaataacacattccgcaagtactctgagtttctaaccaacaatgaaaacattccacagttagacttctctttctagacactcactgacagtgacattagaattaggtggcttttatgtatagatttcatatgcaaaacccttcatggagacttaatctggaaacttcatggtgggctggtttttggctatctggaagactttgacgggattcttggctcctctgctagtactgattgctgcctgtttgtgggactgagagtccctctccttctccctaagttgaaaccctctttcctccattcttttgactttattgcaaacaccctactctgtgactactggcaaaagtgtcttctttttattaattcctctgtccttgccagggccacctcataggtgtgagatgtggactccagggccccacacttaagagggctcagtgcttagtttaatgctttgctgtcccatttttgaggaaggggcctcacatttttaattttgcactgggtcacacagatcatacagccagtcctgctccttgctgtggacgtggaaacagggagaatgctcacaccatacaaggtatgactggatggtgtacctgttctcctcccctttggaactcagcaggcattttcccacagagacaatccataaaggcagatgatgccaatgacagctccatcctccttagcctcagttccttcatttctaaaatggggacagtagcacttacccttgcatgttattgtgagcaatgagtgggatgatgtataaagtacttatcagagtgtctggtatacatcagtgcttgctcaatgaaatctatgtgagacagcagttgcggcaaacagagcttggactctggagtgaagagctaggtcagaaattaaattagccccactgcctaaaaaatacatgacttttgttagttgacttggtttcttccagtgtcagttcctttatctgtaaatgggaatgctaatatttatcttgaaaggttgttttgtgatttaaataatttaatgtatttaaagaccctagttcaccacttggcatctaggaggagctaaaaaaatgaaaacagttcttagtcaggttcccctttaacactattgctacacctaaaacaaccaatttggccaggagtggtggctcacacctgtaatcccagcactttcggaggccatggcaggcaaatcacttgaggtcaggagttcaagaccaggcttgctgacatggtgaaaccccatctctactaaaaataggaagaaaagttagccaggcgtggtggtgtgtgcctttaatcccacctactcaggaggctgtgtaggaaaatcacctgaacctgagaggcaaaggttgcagtgagccaagatcacaccactgcactccaggccaggtgacagaatgactctttctaaaaaaaaaaaaaaaaaaaaaaagaccaaaaacatcccccaaaaagaaaacaatccatttgcaaatgatgtttgggatatgaccattaataagttcttacatattatacgacttcctgtatactatatcacctatgaaatgtaaccaccttgtatgttaaaataattttgtaaagaatacttgagcactatttttccttttcttttgctagacgacgatttccttgaaggcaggggccacatcttatgtgccctttattccagatcactttcaaacactttagaatctcagttgaatcaaatttctcttttgttctttatgccaacagtgagacgataatctccctaacattcctcaattagcaattaatgattagcctattgataactaggaggtagacagggccaaaaataaccccatctctgccgttaaaggccttttcttttttgcccatcatacatggctcgtattcctgcctcctcggttctggttcttgctccattaatgaaactattccatcagagaacataacttggttttctggaacccactatcttccctggcaacaacccatctagagaggccatggaggaagaatttcctgaaaccccaacatttgagtcataatttgatgcctcttaggattcaaagaggcctcagacctgtgacttttaaacattttgggagtataggttcctttaagaatcttctgatagttatggacattctctgcagaaaaatacattcagtaccttagtacaatttcaaggtgttctcaaaacccctgaagcccttggatcccaggttaagaattcttgttagaatagccaagaaaagggaatcagcaacgtgaatgattccggtttcctggtaagtgttccggacctgactagtcactctcccttgctgaaaacaaaacaaaacagaacaaaacacagcaatgacaactcccaagatttaacctcaagattatccctgagagtccaaacctgggcagtaatggtaaaggcttccggccaagcagtaactactctttggagaacctcagttcagctgagtaaaataggccttgtttgataatgccgtttacatttccaaatcctgggtatcaagctttcttcctatgccttgcggcctttcctaagtttagccgctggtgtaatggggtaaccatggcaacaaccacctgcctatttaaaaccatctccaatgctaaataaggaagcctgaagaaaatggctgcttgcctgcctctcagtggacaaattgggcactcctgggtattttagacatgggcgaataggcagggtagaagcagtatgtatgcaaagttcttcataggaagcgttcggtgaccttgtgaaataggtgctacctcagcccttctgtcttcgtttgttaggcgagcacgcaggtttacgtgcaaatccgtgggcctgtcaccatgtcatccatgctaccttgacctcagtcaggtgaagagtgagctgagaacctaccctcagagagaagtattgtttataggatctcggaagggagaaggaaaaacagttctacagatcacagtgaatttgttcatactttgcattaaaatgcacgctacaatctttttttttttttttttctgacggatgtgtctttctaattgtacttaatcatgtgggtgatggatgattgctctatttatgtcatatgttggcctgcctattgatttttggcatatggagaaatttctccctccctctgcttccttgctttctgggaattacagatgtttggtttctttcctctgccgagaccatacaactgatcacactgaacatcttgctcttccacaagtatactgcaccctctcactccttcgtatcttttcgtacatttgcttccttctccctgtgttgccctcctctttttccgtgtcttggttcaggcgtctctgtcattggaaaaccctccatgccacgtttcgtgtccttggtttttgctcccataggtcacctccagttacatcacttaacacaaaccattctgcacatctgctttccagcctgtttccagcaccaggctgtgagtcccctacatgcgtctgtccaaaatgcctgtagaacagtgtctggtgtgcattacgttttcaaaagatctgctgaatgaatggatgaatgaatgaacagagccccgtggctttcacaagcatatggcacatgtgcatgagtacgtataaggatacttgtgtgaggccgggtgcagtggctcaagtctgtaatcccagcactttgggagcctgaggtgggtggctcacttgaggtcaggagttcgagaccagcctggccaacatggtgaaacactgtctctactaaaaatacaaaaatcagctgggtgtggtagtgggtgcctgtaatcccagctacttgggaggctgagacggaagaattgtttgaacccaggaggtggaagttgcagtgagccaagatcgcgccactgcactccaggctgagcaacagagcgaaactccatgaaaaaaaaaaaaaaaagatacttgtgtgaaaagaggaccttaaaagcctgaggaatgggttgaagaggagtactttttaaaaaagtggtttgtgtgtatctgggagtgcaaaagaccgttagaggagatcatctgaactgtaagtttgtgactatagtatcaggggctggaagtacacgtgttcctagtgtgcagtgagtgtgtatagtctgtgtgtgtgagagcaagaagatgctgtggcaggatgcacttcctaaaaggttcgttcagctgctatcggatcccacagatcgctctttctgaagctatagtgttcagtttctgacctctaaaaagacctccttcttcttggttgacttctcaggctgtggggtcaggacaaagagtaggaatgaaaatggccagtgatgaaaatgatgggtcctgggctttaaatgaatgtcttcaatgaacactctaacctctcttttaaggacaattcttgcttgtaatcccagcactttgggaggccgaggaggacgggtcacttgaggtcaggagtttgagaccagcctggtgaacatagtgaaaccccatctctactaaaaatacaaaagttagccaggcatgatggtgcacgcctgtagtcccagctactcaggaggctgaggcaggagaatcgcttgaacctgggaggaggaggttgcagtgagacaagatcacgccactgcactctggcctgggtgacagagtgagattccatctcaaaaataaataaataaataaataaataaaaagacaattctgtgggctaaataaaagtcaacacctttaggctcaaaaacaaagtccaaatcattatccattcttctcccaacctacctagggttggggtgggaacagtgtctgaaatagtggtcatcttgaaatagtacaacaaagaaaaagaaagaaagaatgaaaattgactaatgagaagatacagacaaagaaggaaagagggagaaaggggtagctatacgtcagtcacaactaagttctggcaaatttcatcctacaaggaagaagggtttgctttctcttgcaaatgatctggtttcctctttcctttcatttttgaacctaacttggtgacttcacagagtgcccaggctgaggctgggacttagtgggttccgggtctccagcctttgcaggtacctctctgctgctgccctctgctgtcgggggaggcaaaggagacacccttctggtcctcctggtccaagtcccggagctgccacctcctcccatttgagaccgacagaagctagggtctcttccagcctccctgctcttccccaaaagaatcatgaggggctggggttggaggcgctgtacttggaagcagcagagactcaggacgggggttccagttagacaagggcagacgccctcccacctcctcccctgcaaaagcaggcccttcatacccacctcctgccctccagccctgccctctgcacagatcctttgggagaggacaggcagttagcctgcgccaagtttctgacacttttttttttcttggaaatggaaaccctccttccggcaagtggcaggaaggccaagtccccagcggccctggctgggaaaatttccagagagcaggtgaaaggcctctgttccgccagggccacactgggtgggtggcagcgcagccgggcctgcagcttacctgctgttgaatttttcaggatgtttctctctcatcacatggaatctgtgtgcaatggaagcgtcctgaaagtgaaagagacaaagcagatccttggtgagtggtcatgacagtgcagtgcggagggaagggacgcacgcatgcactcgctgagtcatgccaaccctgggactctatctatcgcatggtggggctccaggtcacatccgcggagccaacagaggctcaacactgcctccagggggatgagctagcaccaccaatactcttacagcctatgccagttgactctggagtccttgctatttcactctagcccggacccgctgagaacagatagatagttcaggggtgagtgaaggggaaagcctttgccctctggggagactgagagtctgtgagcagttagagatcaggagcctgtgtctggggctgagcatgagtctctggaaatgactttccatactagttctttttaaaatagtttttattttggaatattttgactcacaattaagttgcaaaaatagcatagagttcctaggtcccgttcactcagcttcccccaatgataacattttatataactataggatattgtcaaaaccagaaacctgacattggtagatgctattagatattaagtcttaaccatccacaccaatagaaataattagtggcactggataacatgcttactagataataaaacaaaattaaactctggcttctgcttcttgatcacttcactcgaaggactccctccaaggccaataagagtcattattacatcatgtggacactgccctcctattagcacatccctttgccacactagcggccccctgcactccagcactcacagttaggatggctgtcatgcactgtgctcctgggctctccatcctctgaccacaactccctaaccctgggttctacctgcggcccccactccacaccgtggccatctcgtgagttctcgtggctgttaccagcatctgaatgatgatagctccaaagtgtcaatctctagagccaaccctaagcctcaaacctgaaacggaacttgtctttcctcctcaaactcggtcttccaccctcgacaatggtctcattttccagcagaagaatgtgtaacgccccttcaccgctcaggccccatactggtactttgggtgcaggtgctgggcttcagaaataaacaggctaattgagccggagatggggggtgacacagaaaccagggagttgactagatttgttttgcaatgaaaaatatacaaacccatttactggaatacatggctacaaaacacttgaaattccatgcagtgaattttgaattttcatcaaatgcatattaattctatttcttatatgaaaatttctgtgttttttttttttttttttgagatggagttttgctcttgtcgcccaggctggagtgcagtggcatgatctcgtctcactgcaacctctgcctcccaggttcaggcaattcttctggctcagcctcctgagtagctgggattgcaggtgcctaccatcacaccgggctaatttttgtatttttagtagagacgggtcttcgccatgttggccaggctggtctcgaacctcaggtgatctgcccgcctcggcctcccaaagtactgggactgtaaatgtgagccactgcacctggcctctgtgtgtgtttttaagcatcaagaggtatagttctatgaagaagctttttgagcatgaactctgtgtggtgaggtgcacctggcataggagtccagcagcccacatctgaaaggtggcagggcaagaggagaagatgggcttattttgtgattggcaaacattctttgctaaaatgatgttttgagagtttaaaatttaaactttagctattgatgtttttttttttttttgagatagagtctcactctgtcacccaagctggagtgcagtggcacaatcttgtctcactgcaaccttcacctcccaggttccagagattcttccgcttcagcctcatgagtagctgggattacaggcatccgccaccatgtcgggctaattttttgtatttttagtagagacagtgtttcaccatgttggccaggctggtctcaaaactcctggcctcaggtgatctgcccaacttggcctcccaaagtgctgagattacaggcatgagccaccaggcctggccaatttattttttagcttaagatatattaagagtttaaggtcttggagaggcacccccatgggtgcacgggtgagatgtgcggaccccagagaggcctctgtccctgaggcctatccagcctgcaccgcttccctgggcagcagcacttcatgctcccagactgtacccacctcccactctctgagcaaatttcagtgaacaccctcaataagattcatgtgacatttgtcaaatgcttctctaaaattcgagaaaatattccatctacttctattcctttgaagcactaattttcgtctgtcaggaaaaaaaaagtggaggggggcggggaagaaaaaagcaatcacatgttgcctggcacaatttgtacttcgctatcccctacccccaatactgctgattgactcccagcttttttattctccgggatatgtgtacaggccccctccttccatgcagttctgattgtctttggtttttccataactaggttttgcaaagatgctttttacaaagaccagcctttaaaacattattagtgaagcacgtggtccctaatttgacaatgtaatcccttggcaaatacacaaagtagcaagggagagtagagcagctccttttctaagtcttaaaaaggcaatgagggtgaagactctgaccacgtttctctatctggggattaaaaagagagtcgagattcactttcactctctggagcttctatgtcaggcaatgacctgagcatatttacaatcagtagtgacttcatttaaatttgggaaaccagggctacgatggttcaaaccctttcttggttattaaggcgtaaaccctttcttgatgataattaaggcaaagcgagacttctgttctgaaggcaggagatgggaattacaaatccatggaagtgatgatagcatttctcacagccttactctctgaggtcttttctttcaggtgtggggtgaagaggagatggtggaaggtatggacatagagcctctttcctgaactacaactccaagcacatgggtggacaaagaaatttgggccccttccaagtacatgcatcagtcatttggactctgagatattggagtatctaggccagtgctatccaatagaaatacagagtaagctacacatgtaaatgtaacttaccattttctagtagccacataaaaaagtaaaaacaaaaaacaaacaaacaaaaaaacaacaacaacaaaaaaaaacagatgaagttaatatttaaaacaatttttaaatttttttatttttttgagatggagtctcactccgttgcccagcctggagtgcagtgccatgatctcagctcactgcaagctctgcctcctgggttcaagtgattctcctgcctcagcctcccaagtagctgggattactggcacctgccaccacgtctggctaatttttgtacttttagtagagacggggtttcaccacattggccaggctggtctcaaactcctgacctcaggtgatccacccacctcagcctcccaaagtgttgggattacaggtgtgagcccccacgcctggcctgaaattaattttaataatatattttcattaacccaataagccttgaatattatcatcacatggaatagaataattattgagacattaattttttatatcacatttttgaaaagtattgtatattttatacttacagctcactcaacatcttaattaagacaagccccatttcaagcatgtcataccacatgtggctgatggctattacattggataacacaggtctaagtcactttggcaatttacggagataaaaagatggaaaggagaccataagacagattatttgaaattggggttgttctgaaaattatgggagattggggaatggaaaagggtatagacccttgtccacgtccctctggggagtcccactgtattagtatcttcatggctctcacaggtgacaaataacctggtgccagcagaatccaagaatctgcaggaaaaattatgtcttgttgagaaattccctatgtgtaggacgcttatcatggtgggaagcttgtctggtgatagctaggaacgatctgcaaggtggaaaacggtgcgtgggtcagtgcaaccactgtggcctctccttggcccttgggctcccctagcatcagaaatagatttcactgaatcaagggattagctgttcacccgtcctgttaaggctcatgaaagcagagcttgtgaggagttcagagttacacataccttgggaattattttgtagtcccaaacttcctgtcactgatacctggccatcctgacattttctgctaatctaaaaataaagaacagggaggagcaggccagagaagtcagaggaagtggcatcctgaatgactgtgtttaaaatctcctgccagtagatattatcagttagaaggactgataaggccaacgatcttagcttctcactggtgagaaactgatgtgtggatggggctgtcgtagcaatgagggcacagtcactccctggagaggccaggagaccctgccttatttattccctcagctattaaatgggttctgttggcatcaaggggtctcagtaaactcatcagagaaaattctacccacagcacccaagggcactgtctcagaggtcattgtcatcatctttataaatacaaagcaacagatgtttgctatcataagatattctaggtccttcaaaagaggcaaagaccttggcagggctctctttgccagtggagtccgcctctatttgatcatcataaggaagtaaaacttcctcggtttacatacctacttctcttacaaagtttgggaagtcaaatagggagcaagaccttctgcaaatgtcagccccagactctgttagggttgcgtgttggttacttgttttctcaagaatttctcttttcaacttttaaagagcgagcatacaaaccctgcaaacattttattgagagaaagccaagggcacaccaatgagatgagaacagccctggtttctcattcttctgcaacataatattaaacatggataagctaaaggtgtatgaaaaaaattacaagaaagatattgtgaagttgttcataattggaaagatgaatagattggattattataagtcagcccaaggtaggtaaattatcttgaccactgagagtgatggagaatctgtttatatgtgtttccttggggacaattaattagccagccagcaggacttccttccttccttctttccttccttcctcccttccttccttccttcctccctcccttccttccttttttcctactttttttgctagaataaattaaaactatgattactgaatagtcttggctcttgggtttagggcctggctatttagttgagggaaggctgtccattcctctttgtgtgttcatccatttggtcagcagatactaaggagggccatcttatacagggcactgtgttgagacagggaggtgtggggaaccatgtttttgtcagccagagctgggtgtgttagaaagggaagaggtggggctgaagcttctgcaggcagctgcgctgtaacctgctgtctagaagttcccaggcagctctgccagtcttgctcctcagctctggcttccagcccgttgcttagagggctagttctcccctccttccttgcttccctctccatttatttcagttccggcttccatgccagcgaagagccacttcctttgaccattcttctctgctctagtaggttgtcttcactccctgagaacttggtcaggaccatctgcatcagaatgatctcagggtcttgttaaaaatgccagttcccagaccttacccagacctactgagttggaatatgaatcagcatctgttgtgggggtggaatttacatttctgataagaggtggtggtgagccaccacaactaaattttgagattcccctctttcaaaccatgttacatttggcaacatgaagacggagggggcttcaaggaggcacaaagctcagtggtccacagctcagttggctctagagttcaaatattatgattccaagctctgccactcaccagcctgaacttgtttctgtacctctctaagctatggttccttcttacaaaacacaaatggataatgcctgcctccactggcagggaaactatgtctggtgtgcagtaggtactcaataaatgttagcaagttatgttctggttactataggaaaaagacatatgagttttttttaactgtaatgatgggaagcccacgctccagaaccccggacctgtcagtcatgtctaatttgcaggagctgaaggctgcacatgttcctgctgggggaagcggagcctgaacagccggtccaaaaaggagaggggcctttgagcacgaagaggagggagggcatctgcgtgggtcactggagggggcacctggaagaggtctagggaaacattcccctcagctgaggccggggatccagtgggatgaatcagattgggacataggaacccctaaacttgctcccagtctaccacctccaccctctcagaacccgatcatgggcccagcaatgcttccctcttctgctttagtaatagaaaaagagcaccggattaggagtcagagaataaaggcaaatcccttaatctgagtctctgttttcttattcataaaatagagataataatgcccttcagaatatatctgtgaatttggtaaattttaaatccttctgtaaatataaggtattattatttttagtcctttcttctcccatggttctctatttagccttcttattaaaaaaataaaacctaggctgggcatggtggctcacgccggtaatcccagcactttgggaggctgaggcaggtggatcgtttgaggtcaggagtttgagaccagcctggccaatgtggtgaaactccatctctactaaaaatacaaaaattagctggatgtggtattgcacgcttgtaaccccaacttctgaggcaggagaatcgcttgaacctgggaagcggaggtttcagtgagctgagataatgccattgcactccagcctaagtgacagagtgagactcgtctcaaaaacaaaacaaaacaaaacaaaacaacaccctttacttaaacttgctatcccctcaagccacctatcatttctccttctctttcctttaaaaaaaattaaaataccaaaatttcaaaagaaacacagctgaggatggttgaggagtgcaggtatcacagagtctggggcagaggattcgtctggagggtttcatatgcatgtgaaactgggcagcacaactccaaagacaagggaacagagaggagagaacctggctccagaacaaggcaccaccatgcgagtcaagggtctcgaagcctcatctgtagagtgagatgagcaggataatgatacctgcaggactactgtgagggctggaatatgtacagtctagcactgtggagagcacacaggtactcaataaatgctagtggctgttctcacttacaagtgggagctgaacgatgagaacacatggacacgagggggaaaccaacacacactggggcctgtggggatgttgggggagggagagcatcaggaagaaacagctaatggatgccgggcttagtacctaggtgaagggatgatgtgtgcagcaactcaccatggcacacacttacccacataacagacctgcacatcctgcacatgtacccctgaacttaaaataaaagtttagggaaaaaatttgataaatatttgttgaaaaaaagaacaaatagttcaataattctgtcattcttttttttttgagacagagtctcgctctgttgtccaggttggagtgcaatggcgtgatctcggctcattgcaacctcttcctcccaggttcaagcaattctcctgcctcagcctcccgagtagctgggattacaggcacccaccaccacgctcggctaatttttatatttttagtagagatggggtttcaccatgttggccaggctggtctcgaactcctggcctcaggcaatctgcccgcctcagcctcccaaagtgctgggattgcaggcgtgagctaccgtgcctgaccaattctgtcattcttaaaaaaagtaaatactagtgtctttgttgcactcccaccccctcccaacccccagcttcatttatagaaatgattgatctgtcccctcctgttccgatcctgttcacagcagcctgggaagcagtgcccactccaatcctctttggaccagaagctgagctacactagatgtgctggggctagtgggtgaaaaaggaacagagtgctgtccttgcactgagggagtgtgtgtgtgtgcatggcagtggggggcaccagataagcacattaaaccaattccttcaacctaatgcagagtgtgcatgaatggggtgagcataagggctgtgggagcatcaaggaggctcacagcattcagcctaaggggtcagctgggaggagactcccctagaggtttatgatgcccatggagtgagtggaatggggttgagagaagagagaataggagagaaggaaatctgagggctaagccagccagggcaacttgggaccacatggtcttcctttgaagatcagaattcccagttcctgaagctcatgtgagagtttcctaccaaccttgtcccccggttatttcttggtgttgcttttctacgactgctacaaattgcagaaggagaaaatatgtcttttgaaaatttttctgtcttttcctgtgttagttaaaatgacagaggagagaatttactccctaagcaagagatggggaataaagcgggggtgcaatcagggtgtccacactcaggccaagtttcagaatgcttggacccaactcagggctgggggggcaggtaagacaggtagacactagggacccagaggggacaacagaaggctggaacccttcctgggcgtttcccttccatacagaaaggtgatctttgaccaactcaccacaccaatggagaaatagttgttcatgatgctgtatgggacctggtccccgttttccacttcctctctggggatgacttccagatgccagcggtccagcatcaccaaggggctctgctcaatgtctttcaggatttttgtcaagctgcccccttcataacctgtggaggacagcactgcatttgccaccacagcagaaaggctgtattcttgctaatgcacaggtagttgtcagggcaggtaagcccagggcatctgtgactatgggactccccactgtgtctgtgggctagagacacttacgttccccgagccacagagaagggcaggataactgaaagtaatcagaggctgggggcaggggagggagtgggtgctagctaaaggtcacaggcctgtgtagctgaagcgaagcaaaccctggagaagcggtgggctggatggctgggagtctctgcatgggagaacagcagatccttctgggctgtgtcatgtgggagatggacagtgtggcaggcagaattttaagatggccgctaggcctaggtcctgcttgctttgacactgcccaccaagcatagctgatcattgaacactgaccattgcactgcctggtcttgactcattctctgaattagcagccatctggagtccccaccccttttctggccggcagcctgatctgtctgctccatgtgttgagctgaacttctccattttctggcgcatgtccaacgccatgggggctactgcagtttgcaaagttctctgccccttgtcttatacactggttaccactctgtgtttcctcttagggaaatttcaaaatgagggcccatggctatggggcttaggatgatctgaatgcttctagtgacggtaagtaactggagatgtagcattttggtcctcagttttagtcctaattcagaagatcagccatttgtgggagagggaatttcacacagaaaacatctaagtgagcaccttcttggatgggactctggggatgggacatatgagactttgtctttaccctacagttgattgctttctactggggaaagcaggctctaagttgatggtttcaggatgatagtaaactcggggctgagggagaaaaagctcccagagcccagaagaggggcttctattctagattcagcatgggatggagggcagagaaagggtcatggacttgacatgactgcagagttgagtattatgctgcggaatgtgatccataaaagggtaagttcagcctagctctgtagagcatctctgtaaacaggaacacctgttcccagggtaccaccattagcatgcaaactcacctcctccccagcggagacaacgggcaaggtcatttcctgttccaagaggcaggacagccactggtggatgctttgcaaagttggccttatctgcaagacacacagaggaacagagaaccatatgccatgggactgtagaatgtttgagttgtctttttatccctgatctgatgcttgaacccctccatagcattctttgtttgaataccaccctgatgggaaacacactacttcctaaagccatctatcccatctgcagcgtgttaaccaccactaattgagttaaatctgtccatttgtattttatattgagctaaatctgtatccctgcaacttgcatatgtttattcaaatttcatcctaaatctgtcctttggggtggcagcatacaccccaaaacattaagttgcatgtttttaatccttaatgataatcagcacttactccatttattcctcagcctaactttgtaagggattatcctccttcaagtagctgaagaaactgagattgacagagggaaagtagtctacaaccattctaccctgaacacgctcaatctcatctgactgcagcagctaggcctggtcaatacttgaatggcagacagggaaagtaattccagagccaggattcaaacccagatctctatggctccaagtccattcccctcctctcttcaggggccaggcaggtatacagattagtaaaacaggtggggctaggacactagggaatagtgggacattggacaagctgaagatgctcaccttcaactgttcaccactcgagtttaaaagtttaaaaactaacattagctaaatgaacaaaacctccaggtgttatttggcccccacaaccagtttgtcacttccaccacctctcagaattgcaatgacacagattcctaattattcctcttctgacagttgtgaaggacatcagacagaaccatcagagaaagcacaatagaacatgttttcatctggcctcagatctaccgtggcatattgtctaggctgggagagctgaagagggcacaggcatccatcagtcttgggggtgggtgggtatttccatgagacctcagcacgcatggtgcccctggatgtgagcaatgtgattgcggcgtgaggagagatgcaggaatcagcagggaaggctcaagctagggttgtcctggcaaactgggagctcataggtcctccaggttgtctgacctatatcagaaatggctgagcgcaggcaagacccaggactgagatggccactggaaggcttgagatagagagcaaaacaatgcaatggcccctctcgttgtcctcagaacatgtgttcagagcactgcctccctgcctttgcacagcctgctccctttgcctagaaggctcttgtttcctgtgtctgccccttcttctgtgtccccacctcggcaggtcaactgttgttatggtgtttaggctagaaagctgtatgccgccctaggtttttccttttccctcacacatccattcacatatcacattctatgtgttgtctccttactagatctccaagcaatctcttctctctatccccatggtgatgcctgagtgcaggtatgattccttcccactggtatcgctgcaacagcctcctctcggctctctccgcctccagttccaccctcctagtgtgtcacccacactttcaccaagaagggaagtccatgaaccacagtccctcgcactggctcactgctttcacttctgggatggggctgtgtggctcctcatggccccatagcctaccacagtaggcccaggaagcaggctctgcctttctccctagcctcatccttctgcacatcctgcctcccacgcaacatgtcaaccgttctcaagtgttttcacttccttaaagcacaaagctctctgtggctcagctcagaagctgcctttgggagaccctccctagttgccccagcctggacctggtgcctcgtcagaatatttccttagcaccagaaatgatctctttgtactctcttgtaattatctccttgtttgttccctgaatgtattgtaacctccccgagggggactgggtctcattctcacagcatcttcatacatatcgactgaagcctgctatatgcagatgcagtgttaggtgctccggctctgagagtgggcaaaaaagccgtggcttgggttctcatggtgcttaccgactgtccagtgggacagacagataataatgaggaatccatggagataatgcatcatttcacattcacgttggaaaacaaacagaggagcactgtcgtataagaaggtgactgaggctggtgggtgtgtcaggggaggctcccctgagtaagccacatgtcagctgagatctggagtggaagctgactgagtgaaggctggggcagcactgcagacagggtggccaacttgtgtgaaggccctgaggtgcaagggagactggaacgcccaggggtctgagagatgggccgggacctgagtccagatggagagggatggaggtagaaataaggctggaagggtgcgcagcagctggaccacccagggccctgtagattacttcaagggttttgtctttatcccaagaataatggaagccactggtgtgctttatgcacaccatgcacccagtgacatgcaggaaagatcgctatgggtgtagggagagaacagatcagagaggggaccatgggggggcgctgcagagcactgaacaagtgctgaaatgagagtgaacggatgaatatcttacgcagttatcccttttgcttctgcttttttctctttgggtcactaacctgtgaaaaaaactaatgtttcttcctccttctgtgatcttccttctttctgttttgagcagcttctatcacctgtgtcctctgcggatgaactgcataaagctctccgccaaagcctacttctccctcatggtggagagggagccgtgtgagtagtccggtaccgcagccatccaccctctgcagatcagcttttccttccttggctcccggaggactcctccctcctcccacaaacaactccagagcccaaggtgacaggagagcgtgggtggctgcttggcagggctgtgtccatggcaaccaaagcgcccgggggagtggcgggcggcaggtgtacggtcctgcagccttctcgcccagctaggtggtctacttacagcccccggaggcacggctttctctgccctggtcacggtctagtcctggcttgtccttgacttccctcgtcctctcatctcccacatacagtctgtcagcaaatcgtattgccttcaccttctaaagatatccagaagctggccacttctcaccaccactctgtttctcctgtggtccaagccctggacatctctcacttggactgctgcagtggcctccgaactgatctccccgcttctgccctcttctcttaatctgtcatgttcctcctttgctcaaaaccatccaatgtcatgggaccctcccagtataaaagccatattccatagaatgccctatatgtcctagtcacctggcccctcgtcacctctgcttcatccgctgtagcttttctcgaatccactctgctttgaccatgctggcctgcctccagcagcctggcctgctcccactgcagggccttcgtctttgctgttccttctgcctggactgcccttcctcaggtatccacttgactcacccctcctccagatctccatgccaatgttgtcttctctgtcaggtgttagattgcagccttgagctccctgtgccccttccctgctgtactttaaacacttcctgacatactatgtctcacttatttaattgttcattgcctgtctctttcctctacatggtgtgctccatgaaagtggaatttttgtccgttcattccctgctgtatctccagtgccttggggagagcttgacacatcatggagcacaggcagcatttttgggatgaagaatggaaagcccagggctcatcgctcagggcccagtctctgactttgatgactgtcctccccagtgctcccccggccgctttcttgtccttatattacactttgcagtgtttgtctgggttctgtagggttagatcttgactctgcttccatcccagaatttcagtcagtttccatcacttactggggctgatgtgtccgaggacccacagatccaggtagagctgggtagaactcaggctaccagccttctggcctgggcctttttatctagatgtactctactggacacagctcagtgtggtccttctttgcttgcactgatctgtactttctagatgcactttctggactcaggctccgggtgttcatctcaaggtgatttgtcccaggctatgatctatgcttagttctctggcctttaccaaccccaaagggtctgcccagaattccactcctgtcctcccaccccccaaatctggcctgtcctgccactgcccaaaccccagccatgacagatctgctttacaggaaaggcctgaaactaaactgttacctccgtattggagggaatcattcgattgtcttatttcttttttttttttttttccacccaaagcaaatatttagtcaagtgttggtccaggggaagatacaaggatgaacagacatggctccatgtctctttcttttttattgccttctgctgattgtaaatacgcttactataaataagcagcaaacgccctctcagcccatgcttaccaatgcaatccaaaatccagccaactgtcccatctccaccacaggccaaaacacggaagtctggagtatcacggaaaaagttcaacctgggaagaagaagaaaggccaaaatgggcttgttactaggttgcagctgacattgatacatgttgagtcagagtctgccctgttccccaggagtatgttaagacctcgattccttttgtggttgaaagggtcactcaatgttctgaaaccagaagttactatgcagtgccttgaatatggagccaaggccaagggggccatccttgtgcaaggataatctgactcaacattcgacacaaatggaaaatggttttctagaaattctgtactagttacgcagaggagtccagagttttggcgtcaatacaaatagcccccagtgttttcactcctctcgggctctcctgcctgctctgtcctgacacccgccctggtaagcaagatgcaccgaatttgctggatcttctcttcactctcctgtgggccacagtgagtggagtgatgcccttctcttctcaggagccttaaccctggagagcagggtgcttatacctggggtccaccaacctccaagggttctatggattggattcagagggccattaacttggaggagaaaataatacattcttattttccctaagctcaaactgaaattagtagtatttccttcaattcagcatgtaggcaacagaccacagaggttggaaccatacccatgactttgtcagcggtcaaaatcacagccatgttagtgtttcattatggttgtgacagatgcctcataccactgccatgctcatcactgcttggaatttacggtagttattagacccacttctgggtcttcctatttgacgtattggtgaagctcatatattctcatatcactaatttgttttactgttttaataactgttttttgatatggtttccctggtcaccttttattattaaatttatgcattaagaaatattccaagagggggtttctatgcttcaccagactgccaagggggttcctggcacaaaaaagttaagaacctctgctttagaatgaatgtgccctgcggacaccttgggggtggaacttgggaagcctaaggtcaatatttccaatctgcccagcctggtggtctgagaagagccctggagctttcagaatcactgatgcatgtgtaggcaaattaacattccttctcttgcagaactctgctctccgacgggactctccgacgggaagtgaattctgaacagacgctccctccagctaggcagcttgtctgattagagagtgacatgcgcatgagagaccctcagggcgtatcagcccgggaagtagccacctggctcgtcgtctcagatgaaaacaatttagaatacacgaggtgaagctggaggactgtctgccagttttgacagtgggctggtaaaggtgtctgtggggggctgctccgtcacaaggctgtactgttcagcagtgatggcaatcacggtgactgtgatggcaactgcagtggtgtacagaggtgggctctgttctgaaattacttttacaggtaaatcatggcaggtgtactgaatccgcacttatgtttctttctctttttaactgggccttgtactaccgctgccataaacaatagctttggtgtcagccaaccaaagacagggtcaaattctcttttcagagtccttactccaacctctctgaggggtctagctgaacccggagcagaaatcctggtttggaggttgggcaaatggctgcgtgctgggcaagcccagcccagagtatgcagacagccccgggcccggggccggccagtagagggctctcgagcaccggcccggactgggaggaagcccaggctttcctggccttctagcccaggtgctgtaggggccgcatcacagagacctgcagctcaccattagccgcagacacagggaccacgcctcccaccaggcctctttacaaccccatgctaacgagaagagaatagccaatgagtaagtggcaggaggagcaaaacaacctcaaaatcgaatgatttagaaaacaaaagtgattccattgaacaagtaattgtcttgatcctaaaatgaccccacaacggaacaccaaggcagaactctgagtcactgtctagatttccaaactgctgactgacaatgataagaaaactttctcttctctgatgattcagtatgaagacaccagctaacagagccttgcaaataagttaaaataatttaccagcctgttcctcctgtcaatcaaatgaaaggtgtgtgcagttttccccctcttataaaataactttttctaggacaagctacaggaggccacttctcaaacagagttagccttcctgggcatcctgagtatctccaggagtcagagtcagacgtgagaaaaagcagagaaagggagtaaaatggcaggaaggaacaagttgagagacgaaagaaaaaaaaggtgacaaaagaggcatcttcattggagtttaaaagggagggggagaaataagaggtaaagattgtgatctccataccctggagtaggccccccattgtccaggttgaaaacttgtttggggttgagcagatagtggaatttccgaagaattctatggaaaaaaaaagaaaaggagggagagagagagacagagaaggaatatgtcatcgtgagaagtcacattagggcaaacacctctggagcccactggtggcagggatgagggttcatttaaaccccggaggggagggcactgcctgctgaccctggcgtccaggttccacctggcatcacccgtgttatcactcccggttcaaggctgaactaccaacctagactccagctcctaagcccagaagcatcgccccttacaaagaggacagggcagagaaacccagagaacagaactttcattctaaagctttatcctccacagagaccttctcccaaatgttctgtatggtctaggcagtgtgattctgccctctgcagactgtacaaaagcatcacaggaccccctcctccccagggagaggccccctgcagtcctgggatcaggaggaaacgcaggaggtggtgttgggctgtgggggagggagggcgctgagaggccgtgactgcacccaggcctgctttcctggctccagcttggaattgtcaggtcagttcaggaggggtgtcctgccccttggacaggggtgggggtcctcatagttcttgctttaactctactaattattattttttaacctggattccagatcacggtgccatctgttaatgatcccggaattgggaggcagagctgctttaaccattctccctgtccacctgtgctgttcagcaatttctagcctccgctgaactgggcatttcagcaaactgatgaggtggatgcactggcttctcacgggtgacggtagcccagcaggtcctaatcaacgggctgcccatcatctcttaaatcaagagatctgagaggctagaaaggcacaggcatctcagagcgtggtctaactctagtggtcttaataatggctcacgtggcaggctgtgggctaagcaccgtgtctgttctcacctgtgagaggaggaatgataattatctccattttacagagggagaaaccgaggcccggggacattaagtcacttgggccaggtcataaagtggcaggtggcagtgctgggatttgagtctgcctgtctccacagcctgctgtgttcctgccaaggggaggaagggcctgagtcgtgtcgccctagttgctccactttgaaacagaagagaacgtacctttctccttgtctccctccactcttggggttcaccaagaccagcagggggtgggtacccggggtggggatgatcttatacttgaaaggtaaaagaaaaagaaattagctctgcttcatccaatagggggcgtgagatgagagttgaagccaagacagcttcggagaggcagatgagaagcaggagggcaggcagtcaggtgtttttccactggctgaattttcggaggggctaagtagctaagtgtctccagtttgaatggcctttaagtagtgttaacggaaatgagggtttgaggtcaggatcagcgatgggacaatgatgctgtagcttcaaatcattcaacgatgacgtggtcttgtacctacagcacaagatgaaattttgtgggagacacagctgaatatgatcttagaaagcacggccgtctgatcatacgcgtaagtgaaatagcactcgtggagtgaaccacccgcttccaccctggcgccttccaaatgctcatttccggccccagtttcctcctgaaccctggtcccacatttctcactggccagtgggtagtactgtcgactggacgtctcaccatcagtacaagctcaacatgcctcatacatgacccatcttctctccctatgaaactcggcctttctcttggttccctgtttctgttattcatccatccatccaaggaaggtcttgtcctgccaagtctttccctgaaatgtccctttacctctggtagctgccacagccccatgctgcttgtgcctttcccaccctaggtaagtcctgcacaccatccccacacagttccttcccaggacaccaggtcagccataccactcttgcccaaaaacttgtaaagacatctcattattaaaggaggatttggattttgtggataaaatgtaaatttcctaacctggcatcaaaggccttttcagtctagccctattctactgttatctcctaattcctgctaaccctcagctgcaggtgcagccaagtcctgctcttgctcctctagtaagtctagagtgtgtctcttgcattcccacccatgggtctgctcgtgcttgtttcttctcccattccatgtcccgaaatgcccacttccttctttgcagactactaaaaaaatttttggctgggcatgatcactcacgcctataatcccaacactttgggaggccggggcaggagcatcacaaggtcagaagttcgagaccagcctggccaacatgatgaaaccccgtctctactaaaaatacaaaaattagccgggcgtggtgggaggtgcctgtaatcccagctactcgggaggctgaggcaggagaatcgcttgaacctgggaggtggaggttgcagtgagctgagatctcgccaccgcactccagcctgggcgacagagcaagactccgtctcggaaaagaaaaacaaacaaacaaacaaacaaacaaaaaacaccaccaccaccaccaacaaaaacctgcttatcctcagggctcaattcaagagacatctctatgaagtttcccttcatcattgcaactaaaatgattgcacttaaaacatgtactattggctgggcatggtggctcatgcctgtaatcctagcactttgggaggctgaggcaggcggatcacctgaggtcaggagttcgagaccagcctggccaatatggtgaaaccccatctctactaaaaatacaaaaattagccgggtgtagtggcgcatgcctgtaatcccagctacttgggaggctgaggcaggagaatcgcttgaacccgggaggcaaaggttgcagtgagctgagatcgcaccattgcactccagcctgggagacaagagcgaaaccccatctcaaaaaacaagcaagcaagcaagcaagcaagcaagcaaacaaacgcaccatgtactatcttctggagtttcttttgttgttcatttgtatttttttttttttttactttcttagataaatgactcaaaacatcaactggatttaaaatgcattgggagcagagtggggtgtgtgtaaccctactaccaaggaccctatagcaccagacacaagagtgggtgctcagcaaatacttgtgggttcagtggaaggatacaccaatgtggacgcacagctctgctccatattcaatatctaatgcctgcttttccagatctcaagctaaaagtccagcaaacacagtgccatgttgtttgaaaaggatagtagcatttccgatgatctaaaaaatttgtctcacctgcccagggtgactatgtgatgcccagaagcatcttggaggctgaggaataaaccctcacctctggagatgatattcaacgtatttaacagccagtcctacagtgggggctctgccccatcagaacagatgcaagacaacccgatggctgcctgccctaaacaactggcatacatgtatcgggtgtggatatgcatgcgcctgtgtgtgtttcccacctttctgcccttctaggtgtctagagctttctcacatattaagattctcccctcattcggccttatgtttcacttttctttttcttttttttcttttgagacataatctccctctgttgcccaggctggagtgcagtggcagaatctcggctcactgcaacctccacctcccaggttcaagcgattctcctgcctcagcctcccgagtagctgggattacaggcacctcccaccacgcccggctaatttttgtatttttagtagagatggggtttcaccatgttggccagtctggtctcgaacttctgaccttaggcgatttgcccgcctcagcatcccaaactgctgcgatgacaggcgtgagccactgcgcccggccttttacttttcacaacacgtgaatctgtatattctcatttaatcttacagcacctctgggaggtgggcagggcagggattactgtgtctcctttgagcggaggaaacttaaggctcagaggcagagcaggaggccccggttttctatttccttttctagtactctttgttcctcaccaggctgccttccctgcattccttggaactctgtggaagacacaaaaaatgttcattgctgaacccaagtaaaaaaaatgagttcttaagtatacatttaaggattaagaagaacttttagatctggttagcttcattttggcagatcatgttctggagacagcttggcaatcttgaaaaacccattgtctatttttaggccacatctttgttattatttaggacatctgcatattaaagttttatgtaactttttcctaaaatagtaataaagcccaataagaccagcaatgggatcagtcaacctttcctctcaccacttgctgacagtgtggctgtcaaaggtaacaccagaggccacaaataaatgccctcctgggtggtataattagtcagatgagaaggcaaatgctgagatgcttttctgtagaacccaaaccccgtcttgcccgccacagccctggaacaacttagaaggtgcaatcggatttagagctcatgaggtacctgcatgacaagttcgcccttggcggacacgcagccatcagacttctcacctggcctgtcctgtgacaagaaaggaaagacaagcatcttttggaaaaagaagcctaacacaaagaaagagatcagatgaaaaacaaacggctgatataaagaaagagatcagaaagctagtgtagtatggagacgaggttttcaacatagggcttctgacctaaataaagaaatgtacccctatgactttttctaggattcttcaggcctccagtgatgacatcacgggctgactttacctttgaggcaagggacatagtggggagcactgaaagtggcagaattccacttggttgatttagaagcttgagctctgagaagaaaattcttagacttggcgacttggcttttcttcctttcttttttttttttttttttttttttgagacggagtctcgctctattgccaggctggagtgcagtggtgtgatctcggctcactgcaagctccgcctcctgggttcaagtgattctcctgtctcggcctccttagtagctgggactacaggtgcgtgccaccacgcccagctaattgctaattttcttgtatttttagtagagatggggtttcaccatgttggccaggatggtctcgatcccttgacctcgtgatccgctggcctcagcctcccaaagtgctgggattacaggtgtaagccactgcgcctggccgtcgacttggcttttcggctgagcactatctaatgatatgatattgtcatttttcttggttttgtttgtttttctaatgtttattttattaaggttttctcacatatagtaaaatgctcaaatctaaattgtacagcttgatgaattttgtatatggggatggcctcgtaactactacctcttcaagcataaccctgttgtgactcctgataccacatgggttttgcctggcttttgaatttcatataatggattcatagagcatatcttttcgagtctagcttctttggttcagcattatgtttttgagattctccatgtttttactctatgcatagtttgttcttttccattgcaatgtagtttcccattctatgaatgccagatgccgatatgcctcaatttattcatctattctcctgttaatggtcatttaacttgtttccagtttttaactgttatgaataaagctgctatgagcattcttgtgcatgtcttttggtggaataaatgcttgtattttccaggtagatgcactggaggagaatttttgagttatggagtttgtatatttccaatacagtaaatattgctaaatgattttccaatgtgttggtatttttcagggttttttatttttatttttgagacagagtctcactctgtcacccaggctggagtgcagtggtgtgatcttggctcactgcaacctccacctcccaggttcaagcaattctcctgcctcagcctccccagtagctgggattacaggtgcccactaccacgcctggctaatttttgtatttttagtagagatggggtttcaccatgtggccaggctgatctaaaactcctgacctcaggtgatccgcctgcctcagcctcccaaagtgccgggattacaggcatgagccaccgtggctggcctttttctcaggtttttaatgacaaagaagtagctggtcaagtccagagtgagatgtgaggaatgggtgggacttgcaacatttttaagatgggaagatggcaaaattaagtgtttgacgcttgtttgaaagaggagtcttcaacacaggcgacaacgtgccaggtgggggtaaaggagcttaattttgctgctttcatttccaaatcaggctgagacatccaagtggaaactcaggaagtagagggagatactgtttggatgtggcagggagattgacagagatgagggaggttgggagcctggccatgcataggtggtgactgaggttccttgtgctgtgctctgcctgcaaaaggcttagaacaaatgtgctttccttgctgggtcatttcagggtactcggggtggtcagcaattggcaacagtttagtcagagaagatttctctcaaaatctgatctgtgcagcgctgacctctttcaagcacatactgaaagcacaaacccaacagagaggagcagaaaagattaacaactgggcactgggctaaaaacccaggtgataagataatctgcacaacaaactcccgcaagacgtgtctgcctgtgtaacaaaccctcccatgtactctctaacctaaaataacagtaaaaaaagaaagaaaagaaaacacaaacccaaagagttgtcagggaagccctgggaaggatgtgaatgtctgaaagctgcctacatctgaaaccagaacccggagaagctacagccctcgccggggcaggagcacttacccgggtgatggggcatatggaggtgggcagtaagatgtggtctctgagttccccaccgtcacacaacgttgataattcacatttgcggtgaaactggggggagaaatgaaaaagagagtgagtgaaagtgagcaaagaaacatcaaacatgaaggtggagaggtttgggggagaggtgagctgtctagtgctcccccaaatcctgatgcactgctggctttgacagtattgccgtgtgtgtgtgtgtgcacgtgtgtgtgtgtggttaagggtgcaaagtctgctgtgggctgagcaaagaggccaagagccgctcatggctactgaagcgacacagtcatgagccggcctgtgacccttcagtgtggcaccccatgttgattccagagcccccttagatatgtgctctccaggccctgagactctgggaggagggagatgttgatgaacaaactcatggatggctgagagtaaaccttgtgattcaacctttgtattttgagagttctgcagtctggtttggagaaacctacattttgaggctgatacctggggagaaggacaagagctggcagtgagttttgacaggcaggttggccagctcagtggctgccagtggcattctgggtgtctagtggggctgtggactctagcatgtgctgtggctggtggcagcaggtccaaacctttggcccaggcagtggggctgctctgaggaatgtgccttcagggcaggcaccccctcctatgatgctcctgttgtccaatttttctcccactctgtcagtgtccccggccctaggtgatagccaggtaaaagaagttcatagtcggggctgctgatcccagctgccaggccacacagacagtggactggccagcttcttcttcagcagtcctcactcccctggttcgggggtgccctctctctgggcagcttggtaattcactggagcatcgttaggctgagggcattgaataggcgctgtggggtcctcctagcctcgctcccctggctttgctcatgccctctggccggatattcactgctcctgggctgcagcttgggcaaaaaaacgttgaaaagaagcagggccgccctgggcgccaacccaccgtcatccggcaccacacgcagtgccgcgcggtgacactctggtagcacttgatacttttgtggcaccggtcacacttgacggaggagttcccttccacccatgcgtgctgcatcacctgcgggagggaagcgaacgatgccagggaaaatggcagaaccatgtccccggggccctgggctggaggagaaggatctgggaggggacgcgggggagccagagggactgtttcctatttagaggatgcttattggatgttgggtggcttgcctaatggcacgatgtggttcctccctgcctaaccgccattatgcgaatcaaagtagattaaaagctcgctttgccacattttgaacagctcaatcgccctggaaggcaggcctctgagcagcatcttgtctggcagtccatctgtttgtcttgcagaacgccttgcagagtgatgtgtttgtatgcgccctcttctggaaggcagcatggtgcagaggaactctggagggcttgggtaggccacagacaaaactggctggagtccctttgaagtggtggcctttggccagttcttagacctctctgagtctcaggtccctgacctgtgggaattggtataagaagtcccacctctggggttactggggcaatgcaatgagatagcacattttgaagggcctccctggtgcagtcctggccctttgggagtacccacaattgggtaatgcccttctccttcctcagctttagctgcccattagaagtacctgggggagcttttagacatcctaatgcccagccgacactccagaccaaataaattagagtctttgagggtggggcacatgattaatatgttttaaagcactctgggtaattataacgtgaagccgagactaaaaagcactctagaaggaagttagagaaaagtccaaagaagttagtgagggtccattggtgcttttcacacctgtttcctggggagctggttgtatctgctccgtgaccaggaaagaccaccagggcaggctaggcacttggaaacaggtgggaatagtgggattgtttttgtatgtgtgtgtcagtgcggctaaagcaagagcagctggctagtagccccactgtctgggaggctgaaccctcagttccctccccctggaattctcaccaaaattctcactcaaaaattttcactatggtaccacaaataacagaaggaagtggatatggactctgggagaaggtgggggacataccctgaagtgcctagccacaagcacggtattaaaaacccaggaaatatctgcgtgattctgtccaggtttgtattaaataagaataaacgtgttttttttgagacagtctcactctgtcgcccaggctggagtgcagtggcatgatcacaactcactgcagcctcgatcctccaggttcaagcaatcctcccagcccagccacccaagtagctgggactacaggcacatgccaccacaccaggctaatttttgtatcttctttttgtaaagacaggatctcaccatgttgccccggctggtctcaaactcctgggctcaagctattggcccttgtcagcctcctaaagttctgggattacaggtgtgagtgactgcacttggtccaagaataaatgttttaaattacttagcaattaagttgcttaaggcctcccctaagaatgtttttggcaaaattattgctttggaagatgtgtcacgtttggttggtagcttatcaccttgtgccttgcacttctgagggtgtaaagaactcagtttgccaattaatctgtcatctacatggccacaattgaatttgctctgagattattatttccattttgcagaggaaaaaatgaaagtttcagagaggttaagtgactggccctaggttccaaggctggtaagcggccaagtagggtttcctagccaggtcttctgaccccaagtccagggctgtttccccaacaccacatcgccttacccattctctttgggatctgaggagatggtgaaagactgggttgctcctgcaggctgagaagtttgtgagtgtgccctgctggcccctcattggcctcactctgttctctgtgtgacaggtggccagagtgcaggcttagggcctgcgtccagcaggtacaccgtgtgtcccggtgaaaggcatggacatggagcagggtgtgcatggggtggtgcagaaggcgtggacgagagaccatgcagtgtccatggggcatgcacacaaattctaggaggtgcctttctctaccaggagtccttctgcaggagggctgggtaccactctcatggctaactgtctcctgactcacactcctccatgtaatcttcccttttcaggaaggctaagtgcccttcccctgctaattttaaggtaagtctatttccagacttggagaatggcgtcacccaatgaccgagttagaaacctgggagccattccctaccttttcccttctctcatcctccgcatccccatcaccatgtcctggtcctagtggtggtacttccaaattacctctcaagctctcccttcattttctctcctttagccagtgtgacagtcaaaatacccaataaccagcatggcctgggggaccctcagcacaggaccatcctagagcagtgagtgtggatcccaccccagtcgggccctcagcgcagtactgccttttacctcaagtattggaagagtttccctcccctgatttctctcccacatcacactcagagctattaacctaattcacaaattcgatcacatctttatgtgcttgaagctcttcagtggcccccggctgcacagaaaacacctttctcactcagctggcctcataagacctgcttcaggccagatctcaccactttctgagtgcatctcctgccacttccctttaagcatcctctgccccagctatgccaaactaagtatgaatcccggaataagccgtgtctcatgcctttacacatgaggcttcctctgcctggagagtctggtcctcctcgatgcctcatgaagtcctcccaatttgtgttcaagacacaactgcaatgccagctcctttgtgcaacttgccccgtgcttccactgtaccttccacacagctgtgttactgtagcacacatctcactattctgttctttgcttacatgcccgtctctccttctagacagcatagttcttgagcaggctggggagcgtctcttacaacctgtgtaccccctagcatggtgcctggcacatagtgggtaccaggaaggtgctgaatggatggatggatgaacgggatggtttacaggtggtcctcaaggcagagaagggactggatgaagctcccagtgccccttcctgcccaggaatccatgttgatggacatgtttcctggatgaggcatgcagtagaacaaggcagtagatgtcaccaacctcaccactccttttggcttttgagtacgttttgacacaaccaggaatgtttctggacacacagcgttcgtggacagtgtatttacagtctgaaaagaaaaaaagtcaaggcaggtgcttgtgaatagccacgtaggaaaggcccagctgccctcccaccctagccaaggtctgtacctccctttgggtggctggcgaggggcaggggacacatggggctggtcttgcctaacggaaattcaaaacagtctctaattgttcttggaggacagagaccctgcttatctgctgcggctgcacctccacctgcttcactgccttcctctgcaggcaatgaacacagcaggagcacatccccagaaaggcgctttttcctgaaggggagtgtgcggcatcatcctcctggctatgccagtgccactgtattgcatgcccgggacattggaaaatgaatagaaaggccagggcttttttttgttttgagatggtgtttcgctcttgttgcccaagctggagtgcaatggtgtgatctcggctcactgcaacctccgcctcccgggttcaagcgattctcctgcctcagcctcccgagttgctgggattacaggcgttacaggcgtgcaccaccacgcccggctaattttttgtatttttagtagaaatggggtttcaccatgttagccaggctggtctcgaactcctgacctcaggtgacccacccgcctcagcctccctaagtgctggtgtaagccaccgcacctggccaaggtcagggcttttgaaggctaggcaggcccccgtgacaatccacatgaccttgggtaaattgttttacctctctgaaattcagggttttctgtaaaaagggaagaaaacggcctctctttctctttctctttgcagggattgttgcagtagtacatgagatagtttgtgtaaagcatcacgtgtctgggtcagagtagctattccacacattattgctgttgtttttactaccattatgtgaacagcagaggcccacgggcctagaacttaatgggaatgagattgatctataaaatgtgggtaagagctgggtttgaactggcgctggggagactgttgtaccccttttttttttttttttttttttttttgagatagaatctcaccctttcaccaggctggagtgcagtgatgcaatctcggctcaccgcaacctccgactccctggttcaagtgattttcctgcctcagcctcccgagtagctgggattacaagcatgcgccaccatgcccagctaatttttgtatttttagtagggacggggtttcaccatgttggccaagatgatcttggtctcctgacctcgtgatccacccgtcttggcctcccaaagtgctgggattacggcgtgaatcaccgcgccaggcctggcggaccccttctttagcccgttgatgcttggtctttgtggacagcgggcccagctctgccaaggcgacttctgtggctgaggtcacttgctgcctaattcacacgtgcatgttggataaagcacttcagcctggagcacagccagcgggcctccctgcagcagcagctccccggtgtctggtgggttcaggctgagtgttgctgtccacatcacggggcgggcggcagggctctgtgcacccacatattctggtgcctgccatgccttcttgctgcagcccctctgccttctcctcctgctccctgtgtccccttctttcctactccttatcactcttttcccccatctctttttgctgtctccctttccagtcttcctctctgctttttcctctaccacttgtagttttttccacctttccactctgactttactaaaggaattaaaaagtgaaacaactgtagagttttaattcctattgcctttacagaatgtaaaatgctttttttgtttgtttgttttttgtttttgagacagggtttcactccgtcatccaagctggagtgcagtggtgcaatctcagctcaccgcaacctctgcctcctgggctcgagtgatcctcccacctcagcctcctgagtagctgggattacaggcgcatgccaccatgcccagctaatttttttttagtatttttattttttatttttttatttttattttttattatacattaagttctagggtacatgtgcacaatgtgcaggtttgttacatgtgtatacatatgccatgttggtgtgctacacccattaactcatcatttacattaggtatatctcctaatgctatccctcccccctccccccaccccacgacaggccccagtgtgtgatgttccccactctgtgtccaagtgttctcattgtccaattcccacctatgagtgagaacatgcggtgtttggttttatgatcttgcgatagtttgctcagaatgatggtttccagcttcatccatgtccctacaaaggacgtgaactcatccttttttatggctgcatagtattctatggtatatatgtgccacattttcttaatccaatctatcattgatggacatttgggttggttctaagtctttgctgttgtgaatagtgccacaataaacatacgtgtgcatgtgtctttatagcagcatgatttataatcctttgggtatatgcccagtaatgggatggctgggtcaaatggtatttctagttctagatccttgaggaatcgccacactgtcttccacaatggttgaactagtttacagtcccaccaacagtgtaaaagtgttcctatttctccacatcctttccagcaccttagtatttttagtagggacaaggtttctccatgttggcagggccggtcttaaactacaggcctcaagcaatccacctgcttctgcctcccaaagtgctgggatttcaggtgtgagccaccgtacttggccccaaatgcttattaatttttaaaaaataagtttcctctgaacatacccagaataaatattgactagaaaacccaactaaaagtagtatgagaaattttaaattatttgtggactttaataatttcttctagggggtcagtggctcataaaaagcctccaataataaatagtccaagacctgtccattggacttgggtagggtaaaaacaggacatgaaggcctcgctttattccttctgttgggacaatatgggtggtccctcaagctgggaagcagaaataccaacattttctctgcaatggatcaaccaaccatgcgcagagcaagatagtgcctgggggaagaggtttgaaggaaatttactcacaagtgcagcacaggccttgcttgcggacgcccatgagcatgatatggcagaagttgcagtaggttggtttcttgaagtgcttcatggtccaggcgtgccgcccatcccccttggagccctgcaggggtaataggaggtgagaccccaagctggctgccctgagatggaggaagccaggggctgcctcttgcatgttcttccttttcatctcatttagaagatgagttattgatattttttactgttttaaatacaaataaaaacaaaatttttgtgtgtgtgttttaaaaattagcaaatattaaaagcaagaaacatctgaatggaagcatgtgtgtgtgggataaaataaatcctctcccgcatggctggcagaagcataaactgaacaacaatctgatctatctatctatctatctatctatctatctatctatctatctatctattatctatcatctatctatctatctcctttaaatgtttacaacctttgacttaccaatatctccttttcgactttatcctaaataaataatttttaaaaggcagatgagcctttttgtgccctgccagatgcttaacccagcattatttaaaataatgaaaagctggaaatatcctaaaggtctcataattaccaaaaggctaatgatagtacatccgtctgatgtaatgttaggtggcaatcaaaaagatatttataagactatctaatggcatgggaatgtgctcatgatacaatgttaagcgaaaaaacagaatgccatttcgatgatatgttatgatttcagttttatataatagatctttgatgggaagtaatttcattaacctgttaacagaggttggctatagctggcagcaatatggatttattgtattctctgatttctactttctgctgtgtgttccaaatgttttacagtgtgcatgtactagtgtgataatcaagatgaaagagtttagtaaaaacaatgtatttctcctatcaactttcggtacgcagaaaaaatagtgaaaagacagacagagaaagggttagaccatcacctcctgactttgttcagaagtgaaatcatctgcatctactaggtacaccaagcctcacacagtgacacccacatctcccacatcccatcccaggggaacacagcacagcttgaggaatgtccctcctgcatgtgctatccctgaacttttctcataggctccattacaagagtaacactcttgggctggtttcatgatcagtaaaagctacggtaaggtgatgaggatcgatggtcatggatgtagtgtccaatatgcgggactcaaatgtaattcttacttctggggtgcgtatgcatttgggctggtcactgcaaccagacctcagcctgtgcccaggcttcttttatgatctccagaggagctcacattcttttccaaatgctggctttctcctctgggccagagaagctattttcttctcattacctcaaaccctgcttcttccaggacatgagttttatagaattaaaaccctcttatctaacggtctccactttagtaaatgcattcacaaactgataatgattcatcaaaagattgattcattcatttattcgtttgaccaacatctacctcaagggctttttgtaagaattaaatgacatcatgtaagtaaagcttctagttcaatgcctgacatattgtaaattcaaactttcattaaattcttattccattccagatgccggaagacacaaaataaactaaaaagtgtttgttgacgtggaaggaggtagatttgttcccattctagaaatgagaaacagagatttggagaagttcggtaactagcccaagcccacatagataatgagggactgaatgagtagtcagacttgggtcttttgctggccagagcccatgctctttccatcctgctcctctacctcacaagccagggttttcctgtatgggtagaaggaaaatgatagcactcttcagcagacttcttcgtggagcccaaaggattgtcagtgtatctgaaaacacctctagtagctaagtcagttagctcatccccctttctcagctactatttttatggatataagaagtgcatggaccgtgacttgggataaagtaacgtttctgcttgggttatagcaccatcatgtggctctttcctttccacatgatggtggctgcagaacgtgggcgtagccttcctcgtgctcaccaggttttatgctgctgctacgattttcctgggagagagtctgttttgcaaatatctcattcagtgattccccagacttttcagtggttgtatgtgggttttgaaaaagcccaagaagcaatggacttttaagacattgatgggggctttctccaaaaccccaaatagtaagtgttaaaaacttttaaagtacatatttaaaaataagtgcataaaactcttgattaataaaactaaacttgcattggccactttcctgatataaatgagagttttctacaaggctgatctggcatttaggggagacatttgggagaatgctgaggaagtagatgggctctccttcctcctgccacaagacagcgggtcttttccatgcaaagagttggtggtattttgaacctcagcaagtccaaagtagaacagaaaatggaaattgattccctgtaactaaaatgtcccatctttattccctaaatgagaaaaaaaaaatggtgttttggaacagaacttccattttgtcttgagtataatcttaagtgagtaaagtcagcagaaagcatatctaacttatctgagcccttccagttcctggatcacatgggttcttgtacataaagcttcttggcaagggatcattgggtgagaggcgtgatgtgagcgagtaagggggatgatctctggtgctagttcggtggatgtccttgggcaagttccttcatttctctgggtctcagtttgtaaaagaaaggggatcaaccagggaccacaaagatcttttccagcttgactttctagggttctaaggaataagaagggggtcatgtagatcctggttccttgatttctccttagagcttggaaagcactggacatgctatgaaatgattgcaagattcatagttcttgagcttcagaaatgggggctcagctttagtcctgaattgcagagctatgaaatgaagatattataggcaacttggtcagctagaggctcacccagctgcacttgctgccctgttcctctctatggaatagtctcaaagaggtgtaatctttgagatctgtaatctcaaagtagtgttgtcacacaactggtgtgactagtaaacgcttaatgtcaccatttgtgctcctactagttttagtcttccctacctcatgcatggaagtgagttcacttggtaaataggtggagaatacagtaactgggtcagatgaaggtatatataacaatcagtttcacattaagcctgtacacatatgccctactctgatcaaatgggagatttgcctaacacacccagaactttctttcatttgtgtttttaatcaagctgttctccaagccataaactctctctaggtctttaaggccacctgctctttattctcaagaatgggacatcaaaatctcatgcattcttcagggacaagtcaacaccttccaaggtttcttcccactggcctaactctcatgtgtgggatattacaaagtgcaacatctttggtgtcagagacaaatcctcactcctccttttgctccttagggtcagaacctcagttttccatctgtataaattgggataaaaatatttaccttatctggttgttttgattattaaataagataccactaatggaagccacccccacaacagatccgtattttttcctctctcccttcgttctttcctctcacccttccttccccaattctcttagcatttttaaacctaatttgttgaaaagacagaattcttctttgaagtttgtggccctttgcctggttgagtataaggttcttgcaggcagataatgtgtctgtattccctcacagcatgcagaacagtatttttaaagtagtaataatgtagtaaatgtctgtcaaatgaatatacttcaggcactaatggatacaaaataatgtaaatagagaggactttggggctggtcatggcacgtctgttgggcagtctggagcagaagccaaagtgatatgttgatattaacatgaagcccaatgttcctgaatggcaagagatctctgaactccagcttgttgacttacagagtcatccatccccaggaggaccagcaatgggatggtggtcatccctccatggacccattcctgtagagacacaaagccgtcccggtcgtagtccatcccttgcagcatctccttcaatatctgtggaatccaaagagcaatcattgtccattttcatcatcgacatgtctacctgccttctgcctctgctgtcttgttcatcttgcattatctggtttgtgttttacccctttcccctcctgttaagtgtgaatagagcagactgggagtgaggaggccaggcttccaggtctggctctgcccttgggccttgggccagtcaccctgactctgtgggctctggtttgcttatctgtaaaaatggaaataatattgttgtgtttgtggcactgtagcagggattagagaaaatgaatgtaaagtgaataacaaaatacctgacacataggagcccccaaatgtaattattcttataattcatattatctggtgattgaggaagatctctacaattctttctaatagaaatctctacagttctctctaaattctttgactgatgaatttctgctataacattttagttctggtgaaaagattagcatggttatttcagttatgtctgcacgttttcctgctgcctacatttttcctatcagagaggtaggaggtaaagtgcaggactccaaagaagctgcctataagaagatgagtctgggagcacctgcagggttaacactcattcatgtcttgagtgtgtccccctcccgtcttagaagctcactccaaagccaccccatccttatagaaactcacaggcctcagctctgtgggatcccactccaggtactgggcaatatgcagcatttggttgacaatgcaatccatctcctagaaaatagcaaagggagaaaatatcaaaaggagacaaccagagatgtgtcattaagagccgaactcaaaattaagcccagtgggaagagggacagggcagggcaagagaagaagctggtgcagtaactgccattttgtgaggagctcagtttatttctgtctcgaccacaaagctcacgagaagcacagagcatgcataagctggaggtatgcaaaaagctcataaacactgacttcctcctggacccaccttccttcccttattctgtgctttaacttggaaagcatagaaagcactcctatttttatccctctttgtgattatagcttccacaaatacttacaaatcaaggcagatttctcctgtcacttcttatcactcatccccacagctgtagcaacttgggatccatctctcagctcgaggccagtttctcttgcatggagggttactgtgtgtgtctcagctcaggtaccatgattttgattccttttgttatctcctctgtttcctttttaccatggtccagcccttagcccagcccccaggagtccgtgaacaggaaactcatgaggaatatgtttacttgatgactgagccttttggtactgaggccaggctccatctaaaacctcacagaattgttggctgccaatgagtcagtgttctgagagccccgctgaaacacaccagactgaagaggcatttggtgtcaaagttagcaccatttaggcaccagttaagatgttcacagtaagattgctttgggaggacatgttggtagactgaagcaaggttcaaaagtgttacctctgccagatagaatgccgggtccaaatagcaagctaaaacccagcagggattttaaaaaattgtattttatttaagttaaaaaacaatccattgcaaaactacaggataggccagtagatgagggtaagaaagtgggcacaaaggtggggaaaggttttggcagaagttccaaaagaaaagagcttgtgaatctctggttgggtccaagatttaaagagaaaacgtatttcaggaaccaagaattggactcagtcttgggctatgaaaatagaagcagagttggcagatttaaaaaagaaaaagttcccctgaggtcttcctggtcaggccacatttggatacttaaagaatcataggggacggattctgttctgtgccacattccaggaatggcatttacaaaccagagcttgtccaaagtggatatttaagcctgccttatgagaaccagtgtaggaatagagaaattttagcttggagaagattttaggggagatgtgatagcaccttcaaatactcgaaggcctattgtatgggataggtattccatttgtcctggccaggtatgggggacagaaggaagcagagagggatgcagggaaggaaggagttgaggactggcttattttggcctccctgttggattgggggagaaggggagcagaagcaggttttgagttgaaaacgattccccaccacaaagaggagtgcctgtgttcgagaaggaagccctctccagcagtcacccccagcagtggaatggctgtcttaaggtaggagtccatatgacagggattccggtgaaaggttgaatcagataactcttttgagatttgcttcagtcttccaatattacctttaaaacgtatctggaatttaacaacttcttactacctgcaatgattctaccctgtacaagtctacaccatttcatgccttgattatttcaacggcctcctaaccagtatccctgcttgcattccctctgtcacccaggctggagtgcagtggcgccatctcggctcatggcaacctccacctcctgggttcaagtgattctcccatctcagcctcccgagtagctgggactacaggcgcccgccaccacacccggataatttcttttgtatttttagtagagacggggttttgccatgttggctaggctggtctcaaactcctgacctctggtgatccgcccacctcagcttcccaaagtactgggattataggcttgaactactgcacccagagtacagtgattctgttaaaacataagtcaatcacatcactcctctgctcaagatcgtcaatggttctccatttctctggagtaaaagatacactttttttttttaatttttttgagacggagtctccctctgtcgcccaggctggagtaagtggcgtgatcttggctcactgcaacctccacctccagggttcaagcaattctcctgcctcagcctcctgagtagctgggactacaggtgtgtgccaacatgcccggctaatttttgtatttttagtagaaacggggtttcaccatattggccaggctgggctcgaactcctgacctcgtgatctgcccgcctcccaaagtgctggggttacaggcaagagtcactcgcctggccaaagataaacactattaatcacctataacgtttaataagatttgcaaactccccactctcctacccccatcccatgacttctctgatctcatcccctattacttcctcactgtgatctcatctgtttactcattctgctccattcacactggcccggagtgaatcttctaacatcctagggaccctcaggaccctcgcactcactgttctttctcctggaaggctcttcccctagaattactccctcaccttcttcatgcctctgttcagatgccccctcctagagaggccttcctcggcgaccctcgctaaagcttcaacttcttccaacatttcctttcctttatttttcttctcagcacccatccctacctgacacatgtttttactatgctgcttagtgtctgtgcttggactagaatgaaagcttcatgagggcatggaactttgtcagttggctacactgccataccctcagtgcttagaagagtgcctgacataatgcagatactcagtaaatatgtgttgaccaaatgcttgagaatctgtgattctctggatgtttcctcaaatgacccaacccgcagcattgcaatgtagctggagggatcccatagaggcaccctggggtttagagggaattgggatgattcagtttgtctagtggacttcttcccttccttccttcctctggtctgactcagccccatgcatctcaacctcagggccttcctgttaatgagccctatctctgacattgacagtcaggacaacagggcctgtctgactctgtttgccttcttctctttccattcttccttttactccacgagccttgatcgatccttgcctgttcctgaaggggtgagggtgagtctcaggctttctcaggtgcaatgggatgggaacatgtacttagagcagacagaaccagactcctaggctagtgccctggagtaggagaggcagccaagggtgacggcaaagcacatcagcagtgaccagcagcctccttcctctgaaatcagcagtaaccagcagcctccttccttgcacatcaacagtaaccagcagcctccttcctcgtgcccttttcccttggtcttgttgcctcccccgccctctcctcttggcctcaggactcctgcaggaaattgcaggaggcgcttgtgaactgaatgggaagttaaactaggtgacatgctaaagcatccctccatcctgagatttgatgatcccaggcttctagagcgaaaaggtaagttggcattcacgctctgcaaggccggccctttggaaatagcgggtggagaggtcctagtcggatttcctcagcctgcatcgagacattgctattactacaaagacggaactgaacattttcagattcttcctctgcttgctccctgctcccccagcctttctcaggtccatgagggatatttagagtgagaacttaccgcttggtccaggagaccgttctcatctgaatcatagaggcgaaacatgactgtaagaaacacagaggtaagccttgaggtgtcctctaagaagcgcggatggctgaagttttgatgctgccaggtttttagattagttctgtcaccactgtgacgaaggttatggcagccagctctccctccctctgagcacagagtctgacttccttacagagaggctgggccaagggaggagaaccacctggcttctggacctgtctaagcaatacctatgtggctgatgaagtccaggtcatgagtgtaattccctggggagcatgaacacatttcagcgtcactagaacacaacctaaagcaaatgcccagctgggggtggggcagaggcaccagaatttttcttctattgagcatagaaagtgtagagttaggcagatttaaatcctaggactgccctgccacttctggggggtgcccaacaagttacttaacttctttgagctcagcttccttatctataaagtggagagaataatagttggtttctcctaggattattatgaagattaatgtgtaactgataggccaaatcaactgggcttagaacatagaaagcactcaacagatgttactaatttttattttccttttcaaatgaacatttatatatggcatttaacatatacaaggtactgtcctatagactttctcattattgcttaatcctcaataatgctatggggtagttattacggaagccatcttttcctttttctaaaggtattcggaaatacgctattcagaaacatcttcaatcacgttctaactgctgggaagtgatgtaggataaggaagatctgggagaaaaatctggacaagggactacatgtttacttatgggacctggaaacctatgttttactcaaccaaaaggaaaagatcctgtctgtggtctcataagtcagcatggcaggaagcagagataagcatttcttcattttcctgctattctttctttctttctttttttttttttttttgagacagagtttcactcttgtcgcccaggctggagtgcaatggcgccatcttggctcactgcaacctccgcctcccgggttcaagcgattcttctgcctcaccctcctgagtcgctgggattacaggcatgcaccaccacacccggctaattttttatttttagtagagacggggtttctccatcttggtcaggctggtctcaaactcccgacctcagatgatccgcctgcctcggcctgccaaagtgctgggattacaggcgtgagcctctgcgctccccggcctttcctgctattgtttaaaacccttcatcatgcctgctttctctgcggagcacccgttgactgatgcggtgcaaccacttggggcacgtaccagcctggtccccttatttctgctaagttgtccttgtgtcatcatttcctcctagatgttttaatgtctctgcaccttgtgtttttttcaggggtgcatcgctggtcaaagtcaaagtcctttaaaggtagggtcatgggctttcgattctttgtgattcctcagaaggtcccagtcagaggcatgcatcgtatgctgctgactcacccagcagatggttgaatgacatagaggacagaccttttctgctagcattattccaggactctgggcctaggcgactctccaacgctgacctctctctggtcctattgtgcatgaacaatagaactagaaaggcctgagtaagcatccttattttagcagtgtaaccttgggcaagtcttttaaccttcttgtgccttccttctaggttacaatgaggttaaaatgagaatgcattcaaagtacttagcaaatagaaggtgtttatcaatgatagttgttattattgcattggcaataggtgtgggatttcaggctattattcccaaaaaatacatgtttggtttttaaaaagaaaagtttaatttgttttcagtccttaaagttaaggaaggatataaattgatatggtttaataaaaagcaaaccaaaatgaaaactctatatgaccaagtttctgtaacaaaaaattgcaggccgggtgccatggctcacacctgtaatcccagcaatttgggaggccaaggcgggcggatcacctgaggtcagaagttcgagaccagcctggccaacatggtgagactccgtatctaccaaaaatacaaaaagtagctgggcgtagcggcgggcacctgtaatcccagctacttgggagactgaggcagaagaatcacttgaacctgggaggtggaggttgcagtgagcagagatcacgccactgcactctagcttgggcaacaagagcaaaactccatctcaaaataaataaataaataaataaataaaggaaaaaattagcaaaagatggagagggatccaaaagattaaaagagagtaaagagacataataaccagtggtgatgtatgaattttactcggatcctgattcaaacaaacaattaaaaatatctaggataattggaaaaatgtgaatactgactatttgataatagcaaaaggaatcattttctttagctgtaatgatggtattgaggttatatttaagaagaagagtctgcgattttagaggtacatactgaaatatttacagattatatgatgcctggaatttgcttcaagatactctgaggcagagggaatggtgggaagtataaacacaacaagattgaccatgagttgataattgttgaaactggatgatggggccacagatgttcactgtactctctacttttatctttgaaattttctgtaataaaaagttttaacatttctttgcatggtcattataagactcagttggagagtcattaatataaaaaaatctgtcaccttctctttggtagtcactaacaaatacaatgcctgaaactcaaaatccagctaaatgctggaaataatttgatgtttcacttttaacattagctagaagaaaacagaaatctgctacatttgccaccaaattagcacttaagacttgcaattgttaacacttcaaacctatgggagagattttaagctcagctaatgagcaaactgtttcattttgtttttggcaagaattagcctttggcagacttcccttgcttatgtttaagttttgttgactagtcttattattaactggaattttgactttggctgtaacatgtacatttttttccccttactgtctacttaagttcccaagagaagcaaagacaatacagattttttaacaaggtcctgtcatctcctatttttttagaagtatgtctgtaggctcacagaagccagggaaaccatcactggactgaatcatctacaagactgcaggctgtttcagccactgtgaactttctgctcccagctcttactctcctcctgaagacatgtttttaaaacctactttagtagcaccacgaaactgagctcaactcctttaattaactggccccctcgttctctagaggccaagaatcttggggtggcgggggggcataggtagagaaatggacaaaggcttatcaagacagaggttgatgagatctcaagaaaagaatatttcctcatagttaaagagttgcctgggcacagaataggggaaggaggacagatgttgaatatctttctttaaaaaatctattaagaggaggtagcagttttctgagtaaaggctttcaggaagtcctgccagcaaagcaaggaagtcttgaccacttgatgggaccccttccctttccagattctggttctcaatacctgggtttcagatgcccttcccatgtgatacacaactggcaatatgtcccagggtggattctaggagttgttcatatcacttttggtaacaggacaaagaaacctccccaaagaggcgggacgcatatccgtgatatcaactcaatctccagtgtgtttaggaataatggatagaaccccagatccttctctaggaaaaagctgaagccccttgacagggtgagcacttacactccagcttatcctgaggcctccccgtctccagcagggacaggtagcacacaacatccttcaggtataccactggggattccgagcttgaagaccgagggacggggggttccaggggggtcgcagccacttggtcttcagctggtgcttgcttctcagccatatttgattctgcgatgaacaaaaggaaaacatccaaggacattttctgtttagtaaatattaacccctctttgttaccccatccttttcatggtagaggcaagaattttgtagaagtgtcttcaaaagctttggttacatagatgtgaccaaattagtggccctagaaatccaacttgtggagttcatattctctgaagggatcccatgctgacccctttaagagtctatttccttgcaggaaattcatctatactctgaatattcagaaaagatgatagtgattattggtaatatcaataatcaacaggtaaatgtcatttggcctacttttttgggaacatacccaacttatagaagtaattttggctgggatttcaaaatggtaaatggccaacagtcatttctcaatagaccttgcaattttcttttcaaacacatttaaagacacataaaggatgaatattcaaaagagaaaaccgggattgataattaacgaatctccagaaactaggaagaactcaaactaactgcaagtctaatttggatgaagaaaatgcagaaagtggattattgtaccacaagaatggggtaagttttccctttaaaatttctcctttctaaggtaggaaaacactttgtctcttccacactctgtcctgtggttcagaaatataagctctattactaacaagaaaactgggcacccctgttttcctgtgtgaattctattttttgagacactttgagtgctgtcttccgtctctacctccatgctcatcagaaatgatctcttaatatctactaggagtgtacaactcacagaaaacaactagccagggaacaaagggaagatggacagtggaaaatccaatgttttaggtgttgttatattataccaccaagtaacaaagtactgaaggtagaggcagtgggagagacagccttgatcgtaatgtctgttgaggaaggcaatgttacctgtacactcttcattcggagaaacaaataaccaagcaatgggagtgaatattccattttaggcaagcagggctgtgctagatgaaagccttccaggttccagggattcagttgtgggtctgaggagggagttaaccatcatccagatggacaataggagaaaccaaaggtcactgacacaatttgtatattacagagggcctcatgaagaaaccaagatggagcctaggaaacgtggctgcaaagtaaggaaagaaagcttcatcctgaggtctcagaagaccagattttcaaaagtaattttctactggacaaggcccttagcgggatgcaagaagatatcacctctattatacaaaagcagaaagcctcagggtttggcaagtagagatgaaaatacaataggatgagataaagacagggatagtgagataggggaggttgtaataaaattacatatttaatgaagtattaagattgtcactggaggaaaacatgggaacaggcctttgtactgtgtagtgcattacacccaaagttattgctaggtcctcatattattcatcaattaaaactctatcagtgacttctaccttgactaaaatgggctaacagagaccagatttaccctctcacctaaaacagtgacaaaactggacaaaatgtatgaaacaatggttcataggacattatattatcagggaggaccaaacactgatctctgagaagatgagatgactcctacaactgccacatcagactgtttggaaagagcttctaggccgcagcacagagaaggggaagccaggccaaccctggaagtctctctgagtggaggtgaagctggaatctggagcccacagtggctaggattcacagagcaggcactggagaggagggtatgcacagagagctagctctgaatgtgtgtagaaggtcccctttgagtaacagcagagagttcccttcaattattcagctgagtagtaattagcacacttgtggaaggaaaacacctaaggctaaggctggggaaagaactaggattagagcgaataatccctggagagaaccaggagtaatgcctattcccaccaaccagggtagaaaccccccataattcgtgaatcattgatagagtattcagaaacattttttctcagtagtgagtaaatgcctttctggtcctgtccagtgaagcttaaaagatagatccaaaaagatcagactgtttccaagtaacctaactgtacctaaaaacaaagctcaggactttgtaggaatgtgaaaatccagtactcaacatttagtgaagaggcaccataaattctatacaaattcttccagaaaatttaagaggagggaatcctacgcaacccttttggtgaggccagcattactctaaagccaaaaacagacaatgacatgataagacatgaacatgcaaatcaatatcccttatgaacacagaggcaaacgttcttaatattttagcaaattgaggctcataatatgtaaaaagaaattaaataagaccaaataaacaattaagtacatgaaaagatactcaacatcattaaagcacaagaatatttataacatttttatttatgataattataaattggaagcaatctagatgtccatcagtaggttaacagacgaacaaattgtggaatatctatgtattaaaacactaatcagcaactaaaatatgtgaactattgatatatacaaaatggataaatctcaaaattattacatggagtgaaaaaaggcagacccaaaagagtagagagtgtatgataacatttatataaaatctagacaatgtaatttaatatatatggcagaaagcagatcagtagttgtatggggatgaagggtgggcgggtaaggagggtggagaaaagggattacaaagaaaacttttagagatgatgggtatgttcatcatattaattgtggtactagttttacaggtatatacgtgtgtcaaaacttattaattatacacttaaaacatgcaattttttgccaatttacaactcaatccttggatcttgaaccatttctctagttttcactgaagtctactgctcactcctgtcatagagatgcaggggtccaggaaggctgagaggcactgacactgtctcattagtgtccttcctcttcattctgctttatatgaaatagccctgacctatggccatctgagtacgaccctcaggtaccaccagtaaaaaatgccaacaccctcttccggatcacagaggtcctgtcctggtgccatgtcctaaaccctttcatgtgacggctcttgggcagacctgacttgttccactttctcccttggtatctgtgttacttgttccctttcagtggggcagtgtggcatagtgggaagagcaccagaccaggcagcagaagaccgtgattccaccgctgagtttgtgttcagttgtgtgtgatttaacacacaaagtatgtgtgtgtgatttaacacaagcaggcttactccaccacactcaacctcagttttctcatctgtttaaagaggggattgcattaaaactgatgtttacccaaagtcttgaattacagaaatcattcaagtaaatgacttaactaagtgaagaacaaaactgggtcccaaggccgggcacggtggctcatacctgtaatcccagcactttgggaggccgaggtgggtggatcacctgaggtcaggagttggagaccagcctggccaacatggtgaaacactgtctctactaaaaatacaaaaattagctgggcgtggtggcgggtgcctgtaatcccagctacccaggaggctgaggcaggagaatcacttgaacgcgggaggcagaggtcgggaggcagaggttgcagtgaactgcgatcgtgccactgcactccagcctgggcaacagagcgagactccatctcaaaaaaaaaaagaagaaactcggtcccagattatctatacaatacagtctgatcccaattctgtaaaaaaattatagaaaaatctacaaggagattacacacacacacatgtaattgcattggtaaaattatggatgattttattgtgcttttttaaaaacacattttttagagcactgtaaaattcagagtaaaactagaagagggtccagaggtttttcacacaccctgcttccctacacatgcataacctaccatgcctcactcccccaccagagtggtacatttgttacagctgatgaatacatcaacacatcattatctcctgaagtctataatttgcattagggttcactcttggtgttctacattctgtgggtttgggcaaatgtacaatgacatgcattcaccattatagtatacagagtagtttcgctgccctaaaaatcctcggtgctttgcctattcatccttcccttcccctgacccttgacaccactgatctttgttgtttctttatttttttgtgtccttcaaatttcttacaatgtgagtgtattacttttataatttggaaaaactaacacaaaatactgggggactttccttgagatttcaatattccaagtcgctgaaacatctcgacagcctgagaaactaacgaaacaccaggacactgaagttctccttgttcatcccagttagtcctgggccttcatgaagggaaaggtgggctcagcctttcctgagctgacactctgacagtgatagattgctcaggcctccgagccgaagtctggaccctgaaagccctgctcttctgtctttatggctctgggaatgaagtgggctttgctagatctgagcttggagactgatctgataggcctagacaggccacatgaaataagaatctaagctctttccctggcttccacctgggcaacaggaaaaggctggtcttttcagcagatggcctgattgaaggtgagtccagggcttggctcttccttgccggcagaggcccctctctgtggtgactgcctggtcctataattcttgtttctggtgaacagggacatctaattaagacatctgtggaagagggcctaccaggaaaaggtttttttcccttaaatctcaagtgtcaaaagaagataaaaaaatgctgtatacctccttgggccaagagtcagataattgccctttcatgattttactatagggggctgatttttcccatacacaaggaaaatggtacatgacaaaatcacttctccaggaggaaatctctggaagtttctcttttagtcccagaatgatacaactattgcaaatacgcatggaggtcttaaataagtcagctaatttccgttatcatcattgatcatcttttctcaaatatcacataaaatgacatatccccaataagttcttccttggtacctcagaaacattagccactaaaacacaacctgctcagacaatttggaacctcagtgaatgaattgtatcttcttctaggttcctcttgaagttccagataaaataaaccctgtctctacaaaaaaagaaaaattagcctggccatgatggcatgcacctgtaatcccagctactcaggaggctgagacaggagaattgcttgaactcgggaggcagaggttgtggtgagctgagattgcaccattgcactccagcctgggcaacaagagtgaaactctgtctcaaaaaaaaaaaaaaaaaaaagtctctaggtaaataatttggggcaggatgctttttaccactgagtttcttgctgggagtttaaaatctcagagctcctagtttcacactttcctccctagtatgagaatgatctatgcctgaatatgcctcctctagtccatagaagatataagagttatctgtgccttacacagatgcctgaatatgcctcctctagtccatagaagatataagagttatctgtgccttacgtccatttcaccaaggggctatggactagcatggctgagtggcgtgctgggcagggcatggacgagccagcaattttgtggagtcttggcctgctgctgtccctgaagccttcgggaaggcacagctgctcctcatccttgctttctggtgctctgtgcatggagtttgctgagcttatgatccaggggtaactgtttttccccaaccatgctctgctttccatctatcatgacctgtttatctcaccagtcctcagttaaacactgaaaactcgataatccttccagtttctctttttgctgtgacaggagaaaagattagaactacattgaagaaactctctcttcaaggtccctgttgcaattagttccccttctccttcagctgtagtacctctaatctatcttgttttatatacatttaaaatataggctgggcggggtggctcacgcctataatcccagcactttgggaggccgaggtgggcagatcacgaggtcaggagatcgagatcatcctggccaacatggtgaaagcctgtttctactaaaaataccaagaattagccgggtgtggtggcacgtgcctgtagtcccagctactcgagagactgaggctcaagaatcacttgaaccagggaggcggaggtctcagggagctgagattgtgccactgcacttcagcctggtgacagagcgagactccgtctcaaaataataataataataataataatagtaataataataataataatactgcattctttttcccctgggcatatcctaagagctggaattcacctttggatatccataaagcttttcaataaaatgataatgcacagtaaaaaaaaaaaaaaaaaaaaaaggtctgactctctgagtctttgtattgaaagcttcaggaacaacctgggagaaagaaagcccatgagagacctttcatgggaagaggatgcccaggtgacacacttggagactgaggttgcaggctgaaggagataatggcagaccatactgagttaagaatagagtatacttctgtgctgggtgtggtggctcatgcctgtaatcccagcgcttttgggtggatcacttgaggtcaggagttcgagaccagcctggccaagatggcaaaaccctgtctgtactaaaaaagtacaaaaattagccaggcgtggcagcacactcttgtaatcccagctactcaggaggctgacgcacaagaatagcttgaacctgggagctcgaggctgcagtaggctgagattgtaccactgcactccagcctgggggacagagcaagaccttatctcagacaaaaaaaaaaaaaagaaaagaataaagtatacttctggaaggtggcctgaataataaatgctaatatttatcaaacatttactgtgtgccaggcactgttctaagcgttaacatatctaactcacttaaccttcataagaacatttgttatctcacttagggacactgaggcacagagacgttgttcaaacatgcccacggttacagagctaggtagtgttggctctgggaatcaaacccaggcatcctggctccttaagcaacatgctctgttgcctgatccaacttgagttgatagtactcaggacatttgtattgaatatgagaacagaaattaagtatggtaaccttcacctctcatttttgtaggagcttctggccttgggctggccagccaacagcagagaggaatggcttcccattgataaatgtgtcagggaagattccacatctctcacagcccaacagtgggcctatgggcagcaggcaccactacagcagctccgctgagagtgcagccttgctcattccacaggaaccaaccacaccaccaggaccactgtgtcctctctctctataggaaagactgcaggagttttgaggttggatgattctggattgaatccctggctccacaggtcacaccagtggtatataatctcttaaggcctcagtttctcatgtgtaaagtggtgtgattgtgaagcttagatgaaatgtgtaatgagcagatgcctggcaaatatatcttcaagaccatttgagctggcttcctttgctaacttattagcaactcctcaacttattcaaaatagtgtatatatgttgttggaagtcaacaagggcacatttttaccctcttgctctgttcctctccagacatccactggtagagtcatctgcacctcagccttacagccacagccacctctctctgtctgtctgtctgtctctctcacacacacacacacacacacacacacacacacacacttcccctgagaaggctctccactttttctgggcaggcagacatatcagagataaacatctagcaagctgtcccaagtcctgacctgctctgttctagggcaagtgaagcaaaaacctttacccagcctcagaatcccagaacattcaaatgacaggagccccagagatggaggttctgaaggccacaggaggaccagatctgcataagattgcacaattatatgaagacagcactgttggttaggtttccccacttctccccaaggatgaggtattccctacttttcccacaagtcttatattccaaagacttaccagtatcaggggcacaggcctcgtctgctttggtggcattatctgcattctgtatattagtatctgaggaaaaaaaagaagatttaaagaccaacccaggccctctagcttcttggaagggcaggtacaggacatccccatgggacctggtttgccttgattgtgtctgtgtctcggggttatgtgtcagctgggttcatgctcgcttattgggattggctgtgtctcccccattatagcccaagctccaggaagacagggatcatggcttccctctcctctaacacttccaagctagtcccagcctggacacagaagctgaatgtgctccatccgtggaccgtcagcctttgctgaaggctctcttcccccaccatacattattttgtgtctcctctttccccatcctgctctttgatccatagtggcaggaattatgcctcctgtttattcctcttgctgagaggttcatcagggcttcccgtaaggcactatgaggaaaggcgtccctgtcccttggttcatgttcgcaccgttggggcagttactatgttcaggggaccctctaggaatgcagtctgtggctgtggcaggggatgagagctgcgcaaggtcttcccatcttggggaaagctctgtgtacctgcgctgttggcctcactgttgctggctccctccgtcgggtggtcagaggtctcgtgtctgggcttctggctgaaggccaggaagaggtgagtgctcagtggctggggaaggtccacctccaggtacgccctcatgaacagcttgaagacatcatagctaatcggctgagaaggggcaaaagggcaaagtcagtggagagaagcaaagggacagagaggaagagagaaggaaaaggaatagaaaagctggcaggtgaaaggaatggaaagggaggcagtaggacatggaggagctgatggggacaggaatgaaaaggccagggaagtgatagacaatgagaggcacagggtgcaggggatgggtgtaagagagagaaaatgttgcagttgcatattggggcttggtggggcacagaaccagggcaggctcctgtaataagaaatgatattatgtaaatttagataaaaagggacatgttggagagtgagccttgggagtggaggccaaagtgcagggctctgccttagtccaggcctgtgtgagggatgtggctctaatgagcagggacaagatctgtgccctagaatcctagttaagatgaagaaggatgcagttgaaaatatgatgcaaagaaatagttcttctgtggtatcttggtttccctcttgtaccatgacggatgtgatgcctgagtattcaggtctcagaaagtaggaaagacctggaagagaaaagaacaggctccatccttcatgactttcatagtcctgatcttccctggaaaaaccctcaaataacaagggtgggtgtgtgtttctggctcagctgcttctcaaaacatgtccttgtgaaggttttaggcaccaggagaagagcaggaagccaaggacagaaggtagaaccaagagatgtgccaaaaactagaccctcttcctgctgtgtctctcccagtaccgcctggcttctggtcccaggctgggagcagctatgccagaaagggctgctgcactcagcaaacactcaacaacaacagtttgcagtgagtcatcactggcttgtgctttgatggcatcagattcttcatcaaatcggcagatgctcctggaaatcatttgaggaagcactactctgagatctgctgtgcaggcttttgtgaataatagcagccatgagaataaaatccctttgcaggagcctacttgatgtacccatcaaaatgttggtagcatttaaccccttgtctgttctgggagatctgggagacgtcccagaaccagagactggcttacatgtgtataaacaagtttgagttcaaaatcttggccttaaaagcgagtaatggcctccccaccccactgaggggctcacaaataaatttctgtttagcaccaggcttggctgttctatccgtctcctttgcagagtgaaggaagtctgattcagctggacagaggctcttaccagattaggggaactccaagcaaatggtggactcacatttcttgtgacagctacccatctctctgttccttttctgtccccgagtctctgtgtctctttatttcacactctttctgtctctctctgcctctataacttcattgcctcagaatgtcccttcctcccacatcctcctcctttttcctaatatacaataacaaaatcttttcttcctcctctcttttctttttttcttcttttctctttctttctttctttctttctttctttctttctttctttctttctttctttctttctttctttctttctttttttttttttttgagatagagccttgctctgtcacccaggctggagtgtagtggcacgatctcagctcactgcaacatctacctccttagttcaagtgatcctcacgcctcagcctcctcccaagtagctgggattacaggcacgtgccaccatgcccggctatttttgtatttttagcagagatggggtttcaccttgttggccaggctggtcttgaactactgacctcaagtgatctgcctgccttggcttcccaaagtgctgggattactggcgtgaggcaccatgcccagcccctcttctccaattgtaacccacccaccttgatccttgattccatcctcgctggctctgattgcatctccagcattttcttttcatttacctgcaagtatgttaaatgtccactattccaaagaaattgctgtctaccagatctactggcccatccttctcccctttcctttcaaatttctccaaacagaccagattagcctcctcatctccttaatcccattcggattggatcctagcccattacctctgaaactgctttgttgaaggtcacagacgtgatcatctctttttagactgtctcatctttggcctctctgcaacatttcatcttctcttctttttaaaactctctattttccatggaattgttctgttttggttctcttcattctctactttgatttgactgaataatatggcactgttcttcattaatttatttctaaagctcttttttgcattgtctctttgtaccactttaattgacaagtagtattttaaaaggtagttttcagttccaaagtgtactattaatctctttcagctagcatcaaatgaaaactatcagaataaaatatttctggaaagcagactgtactaaatgatctaataaaaagaaagtttagttaaacagtctaacataatgctgtaaaaaaccaaagccaaaagatcatgaaacaagatcagcatgagattcaggaaacctcgtgactggtctcagaccaagcgcatttctcccctttttccaatctgtttcttcttcagcaaattgtgagtgttgaactagaagatttcaagttctaaacttcaattagcttgctccctgaaaaccagctcctcttcctgactccacaatttctgttaatgccaatgacaccattatgctcccaacattacaggctgagctttgaactgtcagttggctgagactagttcttgtcccttccttctgtccactgttcttctgcaacatctgtcacatccagaccttttctatgtccattgtccctgctgccatcaccaaaattcctggattctgacttctgttccatacatctcacctgggccattgcaatacctctccaaggcttccttaaccccatgtccatctgttggtcctcccacctatcttgcctatccttgccctattgatcttcctaaagcacaactctgataaaattgcttctcttctcaaaaactttccatgtgacgggtgcggtggctcacacctgtaatcccagctctttgggaggccgaggcaggcagatcatgaggtcaggagatcgagaccatcctggctaacatggtgaaaccccatctctactaaaaatacaaaccattagctgggcgtggtggcgggcgcctgtagtcccagctactcgggaggctgaggcaggagaatggcatgaacccgggaggcggagcttgcagtgagccgagatggcaccactgcaccccagcctgggtgacagagcgagactccgtctcaaagaaaaaaactttccatggtttctaattgcccatggaactgaattgagattaactgaggtactactgtgttcttacactatacattataaaatatttgcaaaactaaattggcaagtggaaattagatgaatgtaaatagaaggcctaatatgcagtgttctacagtccagtggaccatcctgtgtactctcctagacctttggtattcatagcctccaataatcccctccaacctagatttgtagttacttcaagctctgagatgattctcatattctctcctattattccccatgtgcgtgtatgcactctgtccatgctgacctctgtgttctttcctgagcaaccctccatgcactctaccctgcatgaactgcttccatctctacatgttcaagttccagtcatgctttaaggcccaacccggattccactttttccagaaagccttatgatcgtctgtccctgaatttccctacttggcaccttggttcctgccttgtgacactcatatgtgctgctctgcattgatatatagttgtttgtgacagaccttggttcctctactcaatccagagctcctggaagtagtgagaatgtctcctttcatctttgaatcccccacaccacctaccacagggttcttcataggtatttgaatggatgatgtgtcctaatcagtgcacctgaggaatagcctggtgcctggtccctggatgtcatcaactactatgggatccattcagtctatgtatagattgaatggatatatgtatctccactcacaatttgctgaagaagacacagattggaaaaaggggggaaatgtgctatatatatatatatatatatatatatatatatatatatatatatacatatgtgtatatatatatatatatacatatgtatatatatatatatatatacacatatgtatatatatatacccacatacatatatttatgtgtatatatgtgtgtgtatatacctatatctatatctatatctatatatctatatatcttgagcctcttaagtgcagggcacagtacagtgctgggcaccaatgaattaggcatgagtccgtatcttcaaagagtcagtgttatataagaggtaaagatattgaaataattgcaatgtgtggtcatcagtggcgagtgccataggaaaagagctgacaaactgttatgagaacttagaaaataatactgatggaactcatccaaccatgcatgtccccatcctagagaacaggatgcacagaataaacccagaagcacagaacatgcaaaccagaagagtctcagaggggactcagtcttctgatgcctccgaggctcaggaaattcagtgatgagccccagcgagctagcagcagagtgaaaccagaagccagacctcctgactccctgtccagtgctcctgctactatatctgtcacagggtccagagctggcatagtgctccctgacactccctcccagtatcccatgttcagcaggcaaagacatgcaacgatgtgccacactctcaaggtgatatctgggttatacaaaagttctttaaaagcacagcccaggaacagagtagctgcttagtaaatgcatgatgagagactaactagggagtggctaggggtcatgcccaaaccagatgaccaaccactatgaggcatgctggcaattctctgagacctggactaacatcccaggcacactcatggttcaggccaaaggaactctgtttttccccagcagcttttatgcaggaattagctgggcaatttgctcctgctgcaacacacttaaagagagtgtgttaatccttacacagaccaagaagagagaactagatggagagcttagcaggcatccggcactttcattctcaagacagcagtgtggggaagaactgttactgtcattctggggataaaacaaattttgacaacataaataacttgctgaagatcataaagcgtgtggcagagctgggctttgtgatcaggtgtctgggtccaggctcacagtgccaccaagccacctgcctcttttgcttttctgggttttgcccactctctagctgtctgccaccactctattctccagagaatcacttggtactgatgggcaagcgcatgttcatcacggccagatgcagctctgccactctgcaaagttttattcccatcctacctttgctagcaatctgccccttcccacagctaactcgtttctcattgagacattttagcagcagtaagccatcaaactcaagagaaattaaacccttcttatttccctaaccctgtgccatgacattacacctactagaagtcagctgcactgtgtgagagaacgaaatcagagtgacagagctccctgggacccagcagtgcctggcattacaaaaagtgggggccagccccgacagaggcgagggcggctgcgtgctcatagcagccaagcgactccctgcttctgaaagctcctgtggcctccacacctgcagtggccctgaccaaactgttcctctcccactcatcagccccagggcggacaagctgattagcagccgccgccaggctttgttcccgtgtttttggagctgggggtggggggtgtggggcagtgagttctttgctggctctgctatcttctctgcatggtttctcctcaggaatgttctttgaaatggtgcattctcagtctcgcccctgttctggcaaccttcttcctgcttcattctctctgcaactggtgtattttatccaaagccccttttaggtgtaccttgagggcacaggctctgttgattcatttccagtgtccaacggagaaggtgttgactcagttttgttcaatggatgacaacgtgaataagaaagtggccagtctctccctaagtgaatcctgcagatcagtcacttttctgtggttagtcttcataaaaggactcaggagcagggaaaagggaattgagttaaaaacattctggggaaaggggatggaagagggataataataggtacagatttttaagtgcttgtagaatgttagccactttgcaaagatcctctcatttaattcactcatccacaaacttcgaggctttttttgttatgtacagtttatagatgaggaaagtgaggctcaaagatatgaaatattattcaagaccacttgttgatggcagaggtagaagtctaacttaagaccatgtaattccagggtcatggctttcaaacctgaccctgccagtaggaagtaagtcctggagggcaggaactgtgcttctatatttttatgccttctacagtgcccagtacagtgcatagaagcccaagaaatgttagagtcattgaatttgaaagtagggggagatcttgcattcatttattcagtccacaaatgtttattgaatgcctgctataagccagatacttttccaggcactgaagacacagcagtgaacaaaaatatgctagtgggagagacagacaattaattaagtaaattatatagtgtgacaggtggtgagaagtacttaggaggaaaataatgcagagcagggggataggaaatgtcagaaagagggcttcaagttttagatgaagaaggtgatgatcactgagaaggtgacttgagcatagactggaaggtggtaagataatggacaatgtgatgtgctgaggaggaacattttaagaaacagtaacagcaagcacaatggtgctgaggttacggtgacactggcttatttgatagcatcaagaaggctaatatgctgaaaaggaatgaagatggggagagtagcaagagatgaggtcagagagctgggggaggtgcagcttgtaatgaccttcatgtttactctgagtagggattgggggaaccatgggagattgtggagtagagcagtgacaagctctgacataagttttaacggattgctcaggatgtgtgtgaagaatagactgaagcagcaagggcagaagcagggagatgagttaggagactcttgcaataatctgggcaaaatatggtgatgactcaggtcgggatgctagcagtgcaagtggcgagatgtgtctatattttggatacattttgaaggtagatctaacagaatttgccaatgaattggatgtgggatgtgagaggacagaagttgatgatgactgcatagtttcaggttgaataacttgaagggtagagttgtcatttactgaaatggagtagactgctggaaaaacaggctttataggggaagattaaggacacatcagtttagctcatgttaagtttgagatgcccatttgatttttaagtgtaaatgtcaagtagaaggataagaagaaatcaggagaatgtagaatgtagtgaagaaaatggaggatgacttgaccaaccgtgtccagtgttgttgagcaaaattgctattggatttagccatagggaggcccttggctatcttgactagtgatttgagtggaagagtgaaggttatagactgatgcaaggcatttcaagaaagtaggaaaaagagaatttggaggcaatgagtatagagaagtattttgtacagtttcgctgtaaaacacaggagggaaatgaggtggtacctagaggaggaagtggagtcaggaaaatgtttttaatatagaagaaataacaggatgtttacatgttgatggaaaaataaaatatacgaagaaagctgatatgaaggagacagaggtagagatatagagaaaaggagggacgaggagggagggaaagagggagtctggggaagatatgttgctgaagcaatgcctgtaagtaggccaaaagaggatggggttgagtgcacacgtgggggagttggacgtagataggagcatggagaggtcatctctggttatagaagaaaaggtacagataggtgggcctatggggtgagggagcttgtgaaagatctgttctgtttgttctattttttcagtgaagcagaaaactcagttgttaactgaggatgaggagaggaggggtgagagatgagcagaggagaagtagtggtagtcttctaggacagtggaatgagtgtatgggcttgggaaacatataatgccaggtagcacaaatggctcacttgagacttaagaggaaacatgctgaggagcaagttcttcaaggcaagcggagtctccaagagggaaacaaattatggaaaggctaaaaaacacaggggtttttaaaggcttaaaatggaaatgttcttacctcatgtgggtcatattgtttgaggctcccaccctcattaaattcagtcaaggcatcttttatcttcttggaggaatctgaagagacacaattcacatgtgaaacactggcaaatagctaatggaagctgggccaagtaaattctccctgtgtaaccatgtttatgttggagctgcccctcagtcccagaaaatctggagaaatgtcaccctcttctaccctttgtcctctcacttcttcttttccatctgacttcccccctgcatctaaattatctttctgaaacacaaatctgatcagatcatatccctactcaaaaccattcaagggctttctgttcccccaggataaagcttaccattcttagcttagaagataagcccttaacttggaataccagcccttggtgattttatttatcctattcctcatttccctatttactctacgtttcagccatatcaagttacatttccagacatccctgaacatattgtgcactctctcatgatgtttcttctctgtcttgcaaatttcactcattcttcaagatccagctcaaatgtcaactcctttgtaaagtcttcctttgcaccagtcagagttaagcattcccttcattggctcccacgtgacttgtacacaactatgtaatagtgcttgtcatatagtgttataattatttattaacttgcctatcttgctcatctcctgcttcagctttaccttgagagctgttaactggctggtgagtctttgtctatcatactaaggtctgacgtgtaactagggctcagaaaaacaatatgtagatgagtatataaacatctgagtgaaaatttcaaaacattaaaaattcattaagtatgtaggatgagtgggcattaaaccccataaggctctgtccttggtgctgaaacactgttgtacactatggcaagatagtttcttctacttctggaatcttgacaactctgtcccttttttttttttttacctgatttttattttttatcttgatggataaaattgagctactcattctgacacataaaacataacctcaattatgtctcataattagcatggttgattttatgttcccatggtatttctcacatatttctgacagccagaagattttcctctgaaagttgaggcctccaccccccgccatgatttccccttaatgttccctctatgttgcatttactttggaaggggataaagaaagactcagataattcatcaaacatggtgttttcgaaaatgctgctttccataggaaatcattcagaagcaactggaggcaagactggctgcttctttttggaattttataaaggaattgggaatccagaaaagagactcaataattgttattaaaaacacattatgaatgcatcttgtgcagctatcagcactctagacatcaaagcaaaccagggtttctctgaccttggctatccctctcttccaatattgtgggtaattaagagctttccaagctccattattgttgctatttaaacatctgagccaaaggacgatgttattaaaagctcacacagtgttttttgttgcccaggctctttgtacagagggttaatgtctcttaagcctaggtaaagtagacatattcgtgggctgggctgttctccatggctttgctgacttggattcaatcaagcagaagttctaatcatttcaggattgagacatattgaaatacaacaggaaaatgcttctgttgcctaaaaatggaaatttctttctgaaattcaaaacagatgttgaaaaactaatagctcagtaagagccaggcagcagatgctgtcaatttgggctgcttccattcaattcagaaaacactaaggagggtaagatgcggcaagatactgttaatggactagtgggaaagatgatctaaataactgtggtactaatagctgtcccttactggagaccttcacctgcatagtctcataaactctcctctactaatccatgcaagtattttcttcagtttacagatgaagaagctgaaattcagaaaaattaattcgacttgctcaagagccagggttgtaactcaggtctagtctggctcaaaagtgtatggtcttttcccttgagcattattcactatagcttcctaaacatttgttaacataaagaaaggtgtaattaagggtgacacaatgatatgaagttctatgaaacaccaagttgggaagaagaaaaattaagatgaaagtggggtaggggtgggaactgaggctgccctataaaggaggtagcatttgagctgaggcataaagaattgggtaaggtttataaaggcagatatgaagtggaaagggtattctcggaagagaccaagggagcaacggtgcagagatgggcaccataaaacgtttaggacaagtcagaaccagagagtcatttgtggctagatttgtgggggtcttgaatgtagagttaagaacattgatttgaaatggttaaagatttttttgagtggtgaaataatataaccagctctctgttttctaaagaccactctggaaacaggatgaaagagaagttagaatgagaccagagctcagttaacatcacacatatatgttattccacaagcagcttaattatttaggaaaacaaatcctacattttagaatctattttaatgggaggttgttagctcagccaaaatggctaaataaaaaaaataaaaatctgagaacatgagtacccctggtgtgacttctgcaagaagagtgtagagttagcattttgattgagaaccagtggagtaatttcaattgaatatatgatattttgatgttctcatctcattttggatattccaccattcactgtagcagaattcctttgattctaaagagctgctgctctattttaaaaatcctgctttatatttaaatgtgtgatatatatacacacataaattcatcatatgttcgcataaaataaactgaggttttaataagaaaaaaatagaaaagacatttattttaaaatatctgattaatagcctgaaattaaatggaaaaaaaaaacacagccgggcgcggtggctcacgcctgtaatcccagcactttgggaggctgaggcgggcggatcacgaggtcaggagttcaagaccagcctggctaacatggtgaaaccccatctctactaaaaatacaaaaattagccgggcgtggtggcacgtgcctgtaatcccagctacttgggaggctgaggcaggagaatcacttgaacccaggaggcggagcttgcaatgagccgagaccgcaccactgcactccagcctggcaacaaagcaagactccgtctcaaaaaaaaaaaaaaaaaaaaaaaaccacacacacacaacaagaatccaggaggtttctaactagctttccgtgaggtggattactcatcacacatttacttcaatttgctttatgggctttcataggattatagtatcaataccctttaaaaaagggaatcaacttaattctcaaatttgggacacattactttctccttggatgtccttatatactttataacagttttcttcttaatagatgtctgggttgggtttctttttccatgaggagtaagtaggtattatgcatgactaatctgcttcagtgacagctgctttattctgtttcatcttaagacagaaaagaacaacgagggaatagcatcccttggtcttattttaggtgtcatctgtgggtccaatagtataacctcacagaaaattcctttgtcaaagcctttaccataataccagcactagattcagaggacaccttgttccatttctgcctgtagaaaatagggccatttccacagctctttgtaacaattcccattttgtagagtgcttattatatgctagacgctgtcctagtcaccttatatattttatttaaatccccacaactaccctctaatgtaataattatccttattttagagaagaaaccgaggcttatggaatttaagtgattctttcaaggagacagctcgtaagtcacacttcttaaacatttctaaatcataggccatggttattggattcactggatacttgaacactggtaagttagaagccaggactcttcctctatgaaagtggctctcaaacctgcctgcatgttgaaatcacctggggagctctatacacactgtaacccaggtcttaccccaggtgaattaagtcagcatctcttgaggaacccaggacacagtataatttaaaagcttcctggaattcagatgtacagtcaaggttgaggactgccattctaggacatgattttattgttgtaaatgaagactgtcctaaaaagcccctgaacttgaatacttattgccaagggaaaaaaaagcttataacttctaaatttaaaattgctgtgcttggcagacattatccattgtttaagtggacaacaccaaagaactctacccaacaggtcaacttgttcagctgcttggcaaggtaggagcatgttttgcattcacccagactgtcaggactatccacatacagttctgtcctaaatcgggtgttcagaaagtttttctctttgatcaaggttaccagtgccctaagaagttttcagtccaaaattgtcttctatactttatgtgccaagaactctgggacctaaaccaagcactgttcctagtgtttgagcaaattcaaagccttttaaagggaaaaatttggccctacacacagacacctttgttgccttgtcagtgtgggacaggggtgcgttccatctgaacaagcagacaaatcagagacttcagtgtttacagcagaatattagttgtgctgccaggactagaccccaaagtttatagtctgttgtctagttaagaacacagagtaggccgggcgcggtggctcacgcctgtaatcccagcactttgggaggccgaggcgggtggatcatgaggtcaggagatcgagaccatcctggctaacaaggtgaaaccccgtctctactaaaaatacaaaaaattagccgggcgcggtggcgggcgcctgtagtcccagctactcgggaggctgaggcaggagaatggcgtgaacccgggaagcggagcttgcagtgagccgagattgcgccactgcagtccgcagtccggcctgggcgacagagcgagactccgtctcaaaaaaaaaaaaaaaaaaaaaaaaaaaaaaaaaaaagaacacagagtatttgagcattagaccattaaactgttaaactccgaaaaaactataaatcaacattttcaaaagtgaatctgaaaatccatatatgagagtggaattctaaggtacatgataactcttcattcctcaaagttctctatgagcttctcaaactgtaatgtgcgtatgagtcacattgggatctggtaaaaatgcagattctgtaggactgggccacagcctgagattctacattctgaataagatcctaagtgacaccaattttgcaggttcacggacctcacttgatacgcaggctctaagcaatgtccctgtggatctggggctgactgctgaggcttgcctgtcacaacccagaaaagaccacgatgccgaggacaaaggaacatactcaatggagtagaaagaccataagtggtgggcagggggagtcactgagacgaggggaagggaaagttggcgcatgagcaaaaaaataaaatctagattttccttcttccagtgaaggctgggatgtaagaatacattttctaattactctaggaagttatacagtgagatgcacaaaaacaagagcagagttttgtgagggtcctgaaaaatgtcaaaacagaagggccagggccaagagcactgcatcaaaaggcccacctcttcagccagctggagtcaggcctcagagcagcacgtgggaagcacaggggagaagcccagcttcataagcacggatgtacttgctacacacatattctcccatctaaactttgtttctgctcactgttcatccccagcatgcagcccattgcctggcaaaaaaaatagatattcaagaaagatctattgaataaatgaaggctagcaaagggattgagctggtcacacttgtcccacatgtcctatattctcaggggtatggaaagaaaaggtagactagtggttatcaaccttggctgcttattgaaatcacttgcagggctttaaaaaatactgatgcccaggccccttgcctacaaactgtgattaaatgatctgggaggtgtgggcagaacattggaagtattccaagccttccatgtgatttgaacatgagccgaggctgaggaccactgacatgtggaagtgatggctctgacacagatgttacatatgaaataataagaaaagactttatatagaagcagaggaaattggggtcaatagcaataaaacgttttttaagacacaatttttttgtcataaatgatctgaatcactggtatgacttatttgtgtaagtaaaatttgtattgctagaacattttctcaccttttctccaaataatttggcttcatcagtcgtatttcaagtgaaggtggaggaatggatcagacaacttggaccatcttgcaactaaaagtgtggtccctggaccagcagcatcagcatcacctgggagcttgttagaaaagcagattctcagcagtaccccagacctactgattcacagtctgcatttcaacagctctccaggagattcatgtgtacattaaacattgagagctattgttccatagaaattcctccctatccgtagattctgtgactcctggtgggcagagtcctactcatcgttaaaagaaaaaaaggtctgtggtgctgaaacacatgtaggtgagaaatagttatggctatccttccaagatagaagcaactagatatgacccttcatgggcccaggacttcatgagcatttgatcaagtctcactctactggccagcataaatagcaaggttttagtgacatttacttagagccttctatggttctacatatcagccctaaatatgttctctgactctgacagttttgtattttgaactgtaactacatcttaaagtcagaaactttgtcataatctgattcgaaagaaatatatttcctaatagcacaatttactgattgattctctttaattacatcttaaaattttgctttaatgtaatttaattgacatatacatatctgcacacacacacacacacacacacacacacacacacacacacacacacacacattaatgtatgtttgaaggttgagctccagtgggtactttttgtttaatttgttgttgctgaattgaagcaaatgagtttgtactagaattgagggacttttggttctaatttctattttactatcgaccttctttctatatgaccttgggcaagtcactgagctcttctggacgtagtagtctcagttttaaaatgtgtaatgcttggcattgatatggttaagatttttcccaacttaaaaattctggctgagtgcggtggctcacgcctgtagtcccagcactttgggaggtcgaggcgggtggatcacctgaggtcaggagttcgagaccagcctggccaacatggtgaaaccttgtctctactaaaaatacaaaattagctgggcatggtggtgggagcctatagtcccagctacttgggagactgaggcaggagaaacgcttgaacccgggaggcggaggttgtggtgagccgagatcgcgccgctgcactccaggctaggtgacagagtaagactccgtctcaaaaaaaaaaaaaaaaaaaaagttctacacagtccaagcaactgctggctgatgtaggaaatgtttggtttaatttcttagagaattaaaagtttaatggatgcttcttcagttgtttttccttttttctctttctgaataaatgaatagtttctgtccttgaggcatcatggaacttttaaggaattaacaaaaaattgaagaaaaaatgcccaccccccaatggccaccagcaattattgttaggaagagggtcagtaggcggcatccccacatgcacacaccctctgcggtagaaatctatttaaatatagaaaccaagtattggaggagctaatgaaggtcatttaatcaaccagatgactaaagctgttatctcccctatagtgtccaaacaaactctctgcccagacagttccagggaaaggaaacccagtcacttttaagtcaattcgattccatcttgggcagatttgaccactagtaattaatgtattccacactttaaagacttcctataacttcctcccattagtcctagggctacctcttgaagccattcaaaattaactacacacctcttcccacaacagtactgagctattttaatacaacgagctcttcttcacctttcccttcccttctccaacaaatatgcacagtatcttcatttctccataatgtggttgtgaggccccttaccaactctcaaacaagttccaggttgtccatgtccatcgtaaaccatagtgaccataaataaattcagttctctagagaggtctgacggtctatcagggtaggctagaatgtggatatcagtttgccttactaggcactgtgagtctatgaatacagcctaagattgcaatgactgatttggttagatgaaatagtacaaatgtagtaaaaaaaaaaaaaaatctctgcaaccgctaacagctatgcttctgaagagtacagaatgatgtgggaatgactcatgatcgatattgtgtgctagccagtttccaaagatggctgccataaattctttccctccctatgtgagtccctcctccctgaaatgtggagtccgttcctctacttcactgaatgtgagccaggcctgtgactgcactgaccagtggaatgtggagggagttccgttctaggatctctgatcccaggtgctaaaaagatctgacagcagcttcttctgtgctcttggagccctgagctgacatgttagatttccaggttaccctgctgaaaagaaaggacatatggagaggccctggaagacaagaaagtgctggagaaagaggttccatgaaggaacactaaggtcccaccatgtgagtgaatgagccatgacggatggtctaagtcctcacttgtttgaggcctcccccttgaaggtccaaacactgtggagcagagatgagtcatgcccaccatgtctgcccaggatcctgacccacagactcatgggaaaccaaaatggtggttgtttcagcacacaagttttgaagttgttttgatgctgcaataggtaactgaaacatattgttaagggaaagaaaacagcatacaaaatagcacaacatgcatattctcaagtttgttttacatgtgtatgttgtatatgtgtatatatgtatatgtgcttgcatattttgatatctatatttatacttatatttatacataaacatgctagtgctggttatcactggaaaatagaatcatgagtagctttaaatttcatcgttttataatacaaatttcttaatatcacattagctcttttgataagtactttacattgtagattgataacaaacttactgtcagctatatgtgtgtgtgtctgtgtgtatatgtatgtacgtttacatacaaagttaagttacttgtctccaagagcagttttaagatgccccaccctcaccctatagaaggtcaccagagaaggtgccaactttacactatataaatggaaaacaacaagagcctctcctacctggtaaccccactggagaaagttctcaattctcaggctgtacacttcattattttgttattgtaaagctcctgtttatgtggttacggaagagtggttgctatggcaatgcaatccgactgaacaccagaatgtgtctaaaattggtgggaatgactttttcagggtttcctctgaggattaatcattttgtaagaattgtatctttttttcctctcctgttcgaacaacagtagcagagtgcctcatccagtcccgcgacatggacaacacgagcaagggtcagagaaggacaaaggtaaatgtttaaagaaaaggcccaaccccaacacaaccctcttctactgaatactctggttccttttcatccctccgcctgctcagcggctttgctgcatttggagctcctccttgcctttgcgccctccatgctgcactcttttccacctacttgcctttctggttcttctctctgtgtcttctgctgaatcctgatagaggcataccttaagcctcattctccagcctcttcttttctttcctaacattcctactgtctgagtgccttcattcattttctttctctccttgccatctcctcgcatgattcccaaaccagagctatggactgacccctcatttccactcaaatcccatcacacaccctcctggggcctacaggacatgtttcttagaaagcaggattccccaggatggggtcctactttcctttctagttcttcccccaacactcctgatgccaccaccaacacatgctctgggctccagcctgggagctgcttgcagttcttggaagctcccatgatgtcctccaccctgccctgcccttgcccaagccacgtcctctacccggaatgcccttctccctccctgccctacagttcctggagtctggaaacaatgcgtgcatcaggaggcctcccaccaggctgagcggggccttctcctcccatgctgcccacttctgagcaccggctatactgcagcacccgtgcttgagtcctgtttgtcttcccctgtgaggcagtgatctctttgagggcaggaactgtgtctcatttattgctggatccctggagcctggcacataggaaggcgtagtggatgtgttatcaccatctccaaatcaacaatcccaaacattccccatcagccctgcatcctgatgtcattttctacagattcagtctgcaaggtatctttgatggcttccttttgttgtacgtgcattgatgatatttccaccacagtttcccacgaattagcatttgttcatggccacactcaccaccttagctctttggctcagactaggtttcctccaaaggatcctgcccagttccctggcctggaaactgcctgatccaaggcaccctgcacacagtctccagattcctggctctaaattttgcccacactttgacacacaaggcccaagacctcctgctatccccacgcctcctatgtcctcctcattttctgtgccttctcaccatccagcccagaagctctccttacccacccctgcacaccacaggaatgcttagtgggtgtgttatcaccatctcaaaatcaacattcccaaacattccttttgcttccatcgttccccttccatctgctgctcacattttaaacctctttcctccatggagtttatccagctaaatcctctgttatcggttcaaccgtgccctaaacctcaaatttatgtgttgaagttccatccctcaataactcaggatgtaaccttatttgggttgttgcagatgtaattagttaagatgaagtcatgaccgaatggggggatccaggccaataaggttgtgcgcctaggaaagggggaactttggacacagagatatgcacacagggagaatgtcacgtgagggcatgcagggagaatacggccatccgcaagccaaaaacacagccctgggatggatcccttctccacagctctcagaaggagccagcgccgctgactccttgattgtggacttctagctcccagaactttgagactataaggcttagagacaataaacccacgctggattgaaccaaatagcaaacaacccccataccagtttcccttggtttttgatccccttctcgtttccacgcttagtttatccagctgtaccagagctgtttgcctgctgccttaaagcagttctctgtgtcacgagcacatttctgatgccctaacaagattctgattcctccagggtaggcctctcctttgtgcttcttcttcatccctgacagggcttggtgctttgctgacctacagagctagctgaattaaattgaatttaccctggagggtgattttttgcttcttgtcaatatattagagtttttctaaacccatgggggtcagatgagagaccacaggctctagagtaccaggagggtgacaaaccattagccctatggtcccctgttgacctcggagagcattcggagtcacaggatgctgggctggaagggaccgcagggagagaacacttagtccaaccctcccattgtatagaagaggttgctgagacccagggatgttcagggatgtcacagcatagagagcaagaggcagagctggcacctgaactggattccctgactcctagaccagcgctggggacaaggactgcctactgtgtgagaagggggacctgtgcaagagcaatagagcaggtcaacagctgcaggcctcatgatttacagaagcatcaacacagttaatgtgaagggagaggccatgggacaagggcatggagcaggcagtgcagctgagagctctacaagatgaagggcctcctggaaagtcagtgccatgcagggtaagtgacggtcactctgtgtgggcagcgtgcagtggtcaggtggtgtcctgccacagtccagcaggttcctctcaccaataaggattaggagtaacctgaggggacaagccatgggcccatgtgtggctgtgcaccctaccaccactgtgtcttgcactgaattggttctggggcacaactaatgggaaaccaagagccccaagtaaaagcccaagccttcccaaaacaaagtcaagaaagaaacacacattagcattcagcatcttactgcaagaaggctttgggtccaaatgcaggaatatactacagtaaacgattgagtaacattgtagccatgcagcatgcagcccttcaaaattatgctctgaagagctttaatgacctgagcaaatacatacgatatattaggcggaaaatgcaggcttaacgcagggtgtatacagtgtgagctcaacggtgtaaagcaatatgcacagcagggaagtgctctaagatgtttgcagtgttgtcagtgatttttaacctactctttttttctatgtatattgcaaatttctatggtgagcacgtagtatttactgagcttaaagataattgcgtttttatgttaaatacactaattctgtgtttataaggaaatataagccgtcaggcctgacatcattctttgtggctttgcaatgatcatactgctatgctttccagaaatgatttctccagccaagaagaaatcccgtcccagggctgtcaatgcatttactcacattctgaatatttctggagttggtcaaattcttctggagtgagggagacccaccgttcttcacccatttttaaactttatgtgagtggctaaagggcagtgatggagttttgttcactaggctgaagtggaggcccagcccagggcctggctcattgcaggtttgcgatgtaagcctttcaggagacttctgggagcactcaagtgtatacagcagcagcaggcacctctcagaagatgagacaagatctctgctattccttaggcaacatcctcctgtctgtattcaaggtaaattcagaagtcctggctcttcctagatagaagcagaaaagacattgtaaatgagaatgttaaaaaaaaaaggccccaaatgttctttgctgaaagatctacaggggacaattgttcaatggttcttaaggatggttctccccttagagaggtctgaagagggcacaacgacagttgtctggctggtggtgagagttgaggggcaagctgtggcctgtatgaataggtgggccatactactcagctctgggaaatgttccatgtgtcacatgagaggtggtattagagctgcctaagagcatcctcagggcataaaaatgccttaggctattggatgcttcatgagtaattacaggaacaggagcctatgcagccgttctgtcctgcactgatttctaaattccaccgtgatagctctggtgagccattctggaataaccccaaggctggctaacatctagtgactgaagcagttctctgtcctcttagagccataaaaagggagttagaggaatgggctgctggcctcaatgaggccgggaaatggggatggattcaaacaaacactgagcatcttttcctttgagcctctcatactgtgggtcattaaatcagttttgtggttgtgaaattgatgtaatgagtcacaacaagcatgtaaacacatgaaatggaatagggtagaatgagatggagtcgaaaacactagagtgcatctaccacagtaaggggatgtattatgtcataagacttttccttcagttatacacccatggttatactgatcatattgtgaagtgtctttcttattctcagttgaggttacaagcatggttgggaagccaccaacctaaaaaggtgagaaataaagaccaactgaaacacaggctctactgttgccaaagaacaagcacagttttaacaaaacaggatccatcctgagggccaactgcaaggcaagtctggggttcctggagcatatgagcagtgctggatgagacgaccaagttgggaggtatatatggaccattctctggggaaatgtgtagactggttgttttggacctggagagtgaactagagctgagggaagatgctggagagagagagattctagctttataaagaaaaccttccattaaccagaatgcatggcaaggaaatgagagacccacattcctggggacattaagttctagtctctcgccctgagaagtccaactctctccttaatccagccagctcgactctgctccttggcacatgctactgtcaaggtcatcagtgacctagctgccaaatccagcaggcacctttcagtccttcctcggcttgtttctctctctgcaatctttctttgccatggcagaaaacttccacctagagactctcttatgtttctgggtgtttcttgtcagtctccttcagcctcttcttttgccatctttaaatattgaaatgtttccacagcaaagatatagaatcagcctaaatgcctatcagtggaagactggataaagcaaatgtagtacatatacaccacggaatactacacagccataaaaaagaatgagatcctgttccttgcagcaacatggatggagctggaggacattatcctaagtgaactaatacaggaacagaaatccagatacagcacatcttcacttataagtgagagctgaacactgagaacacagggacacaaagaagggaacaataggtactggggcctacttgaaggtggaggatgggaggagggagagaactgaaaaactacctactgggtactatgcttattacctgagtgacaaaataatctgtacagcaaacccccgtgacatgtgatttacccatataacaaacctgcacaagaacccttgaacctaaaataaaagttaaagaaaaaatgggcacttccaaaatcctgtcctcagccctcttctcactctacatcccttctctgatggacctcatccacctccaagctttaatgacccccggcatgctgcggcagccctgagctctctccttggtctgaatctgaatattcagatattcagatgccttaatccagatctgtatatccaaccatctactgtgactcccttgtgtgtcccaaaccacccctgatctgcatcttccagtgtccccagccgctcgggttatgcccaagagaagccagtgcccaggtcagaggcaggaggctcagctaagctcctccccttttctctcctgccaaacccaggcacagctccggagtttgactgtccactgtgtgctccctcttgtccaccacaccagccctggcattaactcagaccttccttatctcttgcctggcctttgacaacagcctcctgctgctctccctgccttgcgctttgttctcctccccttggtctgctctttaaattgccaaccagatcacatctctctcggtaataaaattcttcagtagtttctactgcctgtagaataagatgtaatcttcttttcatgatacacaaagctctttatgatctggctcgtgatgatcaatttagtacgaaagtgaggagtatcctttagaaacctttgccatcgtgccagggaatctagcattgcaaccactgtcaccgctgctgctgctatcaatgaatggacctgtactttactctgtgctatatgctttatatacattatctaatttagtcctcttaataacatgtcaattcaatattgctgtccctgttttgcggatgagaaaaaaatgaggttaggtatttagtaaacatggtgaggagaaagaaggagccactagtgcttctgtttaagaatgcctcctgctgggtgcggtggcttatgcctgtaatcccatcactttaggaggctaagatgggcggatcatgaggtcaggagatcgagaccatcctggccaacatggtgaaaccttgtctctactaaaaatacaaaaattagctgggtgtggccaggcgcagtggctcacgcctgtaatcccaccactttgggaggccgagacgggcggatcacaaggtcaggagatcgagaccatcctggctaacacagtgaaaccccgtctctactaaaaacacaaaaaaattagccaggcgtggtggtgggtgcctgtagttccagctactcaggaggctgaggcagaagaatggtttgaacccaggatgcagaccttgcagtgatctgagattgcgccactgcactccagcctgggcaacagagtgagactccgtctcaaaaaaaaaaaaaaaaaaaaaattagctgggtgtcgtggtgcatgcttgtaatcccagctactcgggaggctgaggcaggagaatcgcttgaaccagggagtcagaggttgcagtgagccaagatcacaccactgcactccagcctggcgacagagtgagagtctgtcaaaaaaaaaaaaaaaaaaaaagaatgcctccatggcctgggcattctgcacaccttcagaagcacagagggagatctaagaggacgcataggcacactgcatgacagaacaacactgaactaaaaccagaaggcagagaatttgaatctgggctctgcccttctgagctatttcaccctagacatatttttcatcccttgaactttggtttcttcatctaaaacatgaagatattaatgaaaaagcttactgggttggtgttaggattaagtgggttaatatatgcaacaaacataaaaacaaaatccccacctggtgcaatgcctgcacatagcaaacactcaataaatgattgttattatcatccagttgcaaatacaacatgtagcaatgtggcttaaacgatcagctgaaaaaaaaaaaaaacccaaaataaccccattaaaaagtgggcaaagggcacaaacacactcttctcaaaagaagacaatacaagtggccaacaaacatgaaaaaatgctcaacattgctaatcatcagatacatgtacatcaaaaccatgactattattaaaaagacaaaaacagatactggtgaggctttggagaaaagggaatgcctatacactgctggtgggaatgtaaattagttcagtcactatggaaagcaggttggagatttctcgaagaacttaaaacagacctcccatgcaatgcagcaatcccattactgggtatacatccaaaggaaaataagtagttccacaaaaaagacacgtgcactcatatgttcatcacagcactattcacagtagcaaaggcatggaatcaacctggatttatccaatttatccatttatccaatgatggactggatggataaagaaaatgtaatgcacatataccatacaatactacacagccgtaaaaaagaatgaaatcatgtcctttgcagcaacatggatgcagcttgaggccattatccaaaatgaattaacacaggaatagaaaataccaaataccaaatagaaaatatgtgaaaaccaaatactacatgttcttacttataagtgggagctaaacattgggaacatatggacataaatatggaagtaaaagacactggggattactagagggggcagggggaaggggcaaaggctgaaaaactgaaaaactgaaaaattgggtactatgctcactacctgggtgatgggatcattcatactccaaagtcaacatcatgcaatatactcaggtaacaaacttgcccctgtaccccctgaataatagttgaaattttaaaaaatcagctggcagtagtcaagtagaaagtttctagtattgtgccacaggtttctgaacttgatctgatactgctccaggttgttgtaattttgtaattgctcatcaacccttatccactagttttagcgtccactaatgattattgcctggattaattattacaatgatactgattttctaattccatcattccctttatatttgttagttaggagtctattgtaagtaagagctttcccttctgttatttatatcaatttatatgtctactataaataaagataaattataaatatataaagaatatatatgtgtgtataaaaactgcatttatatataatatatatttattttcacagattcttattttattctgtgggttacaaatctgttgctatcttcgactctcagattattccagatttgatcagtggaagctcagtcaaggtggcgatctgttctttagatatatctcagtcattttttcagcacatccttattttctagcactacaaaatgtttcaggctcatctcgtacttcctcagctcaagtgctaaaatcagtcatttctctaaggagttcctttggtgaagaatggcatttgaagccaaagcttgggtaccacgtatgctcactgctgctggggtgtcattgcttctaggccctatcaaggacagagctagaaaatagatgcgtgtgctgggcgtggtggctcatgcctgtgatcccagcacttttggaggccgaggcggaaggatcacttgagcccaggagtttgagaccagcctggccaacatggcgaagctctgtctctattaaaaatacaaaaattagctgggtgtggtggtacatgcctgtagtcccagctactcaggaggctgaggtaggagaattgctcgaacctgggaggtgggggttggatgttgcagcgagccgagatcctgccactgcactccagcctgggtgacagagtgagacactgtcttaaaaaaaaaatagatgtatgtacacagatacacacacacacacccctcatctctctctctctctctctctctctctgttaaataccttgagttcatacttacacctccaactccagtccgacattgcaaagtcaattgtagccttcccttccttccatattttttaactatcttctctaacaagctttgtttccatcatctacaacatacttatttgcttaatacacagaaagtagtttcagaattgccagtccacacctctgtgaaaaacaaaatagacttcaagatttgtttacagttctattgttttcaggcaacggcaaatcctcaaaatgctactctcaaaagttacgtaggttagttctttctcactcccatcagtttctgtttgtatttcattttaggatgttttcttcatatccactgattctttttcagtatggttccaaagtcaaaactatatagaaagatatattcagccaggcgttggtggctcacacctgtaatcccagcactttgggaggctgagccaggcagatgcttgagcccaggagttctagaccagcctgagcaatatggcaaaaccccgtctttacaaaaaatacaaacaaaaaaattcaccaggcatggtggtgtgcatctgtggtcccagatacccaggaggctgaggtgggaagatcacctgagcctgagggatcaaggctgcactgaactataattgcaccattgcactccagcctgagcagcagagtgggatcccgtctcaaaacaaaaacaaaaagaaaaagatatactcagagaagtatccctcattcctcttactcttttcccatctcctcttttctatcttattctcacttacccttatagtatctagtttatacttcctgtgtttagttttgcacatgtgagaagatatgtgaatatcttatttccccctttcctcctccttctcctcctcctcctcctcctccttattctttttcttcttcttttttttttttttgaggcgtggtttctctctgtcacccatgctggagagcagtagtggaatcacagcccacagcagccttgaactcctgggttaagcaatcctcccacttcagcagccccctcccagccctcccagtagagtagctgggactagaggtgtatgccactatgacctgctaattttttttttttttaactttttgtagagacagtgtctcactatgttgcccaggctgatctcgaactcctgggctcaagtgatccacctgcctcggtctcccaaagtgctgagattatatgtgagcctctgtgcctggcttccctttctttctaatacaaaaggtagcacattatagatcatcatctgcatattgttttttcaccaatcaatacatcctatgaatcacaccatacctgttcatagagatctttctcatttagaattaaataggactctgacacttatctccttaaaatccttcagaagcctcccttggcctccaggaaaaaaagagctgtctccttagctagttccacaaggttctttacctgtggtaataactcacctccccattctcacccccattacctcctgccccacacactccaccttccagccaaatctaccttctgtctactcttagcactagcaaagtgcctggatgtgggaggaccccataagcattatggcctgacaaacacaccatgcctttgatctacttgaaatgccctttactccttccttcctaaaacaaatctctactcatctctttagatccagattaaaaggtcacttcttttctatagctttttggaactctttgagcaaatttgcctgttctcccagctgtgttccacagaatcctatgtatttctctattgcggtggttgatgattccctgtgggggacagacacccaaacagctattaataattaacatacaagctggcaagagaagtggtgcagatatgtccagagatttatggggtcatctaatgtgtctgaagcaggcacaaataatcaggaaaagcttcctgaaggagctgatgctcctgctgaggaggggtgacgaggtgatgtggtatacattgctataactcaacaaatattcatattatcattatcatggttgttccattgtagctcagtgcttgaattcacagtggaaaaggctacaccattctttttttttttttttcttgagatggagttttgctctgccgcccagactggagtgttgtggcatgatctcagctcactgcaacctccacctcctgggttcaagtgattctcctgcctcagcctcccgagtagctgggactacaggcacctgccaccacgcccggctaatttttgtattttttgtagagacaaggtttcaccaccatgttggccaggctggtctcgaactcctgacctcaggtgatctgcctgcctcagcctcccacagtgctgagattacaggtgtgagccactgcgcccggccttacaccattctttatttccttcaagaaaagttaggggcctaaaacattgcctgactctccagatggtatcccacgtgacagcccgcctctgccttctgccctttgatgaaggtgacagctgacagccaggagggctttctctagctcacgaagctcggcacttccctcagcagcctgctccatcactcccctctcagaggctctttgtagtatgaacaatcttcttattaccaccccaagcatcttttctgacagaaaaaattgaataggattttctaaataaaactcagattggatattgtctgacttgggtaggagaagagtattttatgtctctacagctatgtcactctgagcaattgcttcagctcctttggcctcagtttccttgtctatgaaatgagggggtgggaataatggtttctaatgcattttctagctctgcaattttatatactggatcaaattctatttgttctgtacggatgtcagcatggaaatcacaagtcaggaggaagaaggcaaattcaatgagtattgaattgcaccctgggtctctctattcatttgaatgaatcagccatacccaattatccaggaacaaacacctcctcatctcctctttgctctcctaaaaacattaattcatgaatatgacatcagattggagaagcctatttatgtgcatttgaaggtttattacaaagccataatgagtacatgttcataagggaagaaagactaaaagctacaaagataaaaacctctttctcttctcagacttgtggaaagtcgcaacttgacaagtgccccatctctggctttaactcctactgttccttcttcaactctataactcttatgcaggctttggagtttagttcaaattgcacctgaagatgccctctttaattgcccagacctggctgggcatatcttgtctgctctccagtagcactttgggtttttctccattatgacatttactgcagtgcatgtacttaccaactgtcttccctacaggactttgaactccttcagggcagaaagagtgtcctgtctgctttgcacctctagctactacaagatttctaagagttcattttttgacactagaaaaatgattctcaaccttttattgaccaagatcattttcatggagtcaaagttcctaccacatctatttacatgtccctatagaggaggaactgggtgataaaaagaattcaagaagaacagaagatgcaagttgcagtacaattgttgatagtatcacttacaagtcacttaatttaccataaaatatacatcaacactcacattttatattaaaataatgacctacacaagtataggctatcagggttataaagttataacagatatagacttataatcaagttactttattatgcttaatctgatagtattttgtaagttacataagttgcttgaatttatcaatgaactgtcactattgtggtcgtcatttacattggtggtcccccaaaccatgcttcctgatatttatgccctttctagtttcttcccttgagtccgggctgcacctgtaacttgccctaaccaagagagtgcattagaagtggtgctgtgcctgtgtcaagcataagccttgagaaggcccacttctgagttcctaagggcactgaactgccatgtaagaagttcagccattttgctggagagatcacatagagaccacatggagaggccacgtggatgaagggagatctaacattacagagaggagaactgagcaacccatctgatgacaagaactgaagcccaagatgtaagaccccagtcaagccattccagccagcacccagtcatctaagtcatcctagctgtgttgtgagacaagaagccatttgggatttcacagccttggcagacatcacacgtggagcagagataacccatccccgctcagcctggtctggattcccaatgcacagaaacacatagacgaataacataattgtggagcaacaagattttggggcagttagttatgtaatcgtagataaccaagacaactacacaagcacttttaggggcaggttatgcatgtgtctatttggcaacagaatctgcatgattcatgcttgaactgcaacttattcatgtcttaaaatctagtagttggaaaattataggctaaaaataccttcgatgcaaatatgtatcactgcctgctgtagggttagccaaatatccttcacaaactaatatgataattatgaagtcaagtgaactataatttctaattaataagcaagaatagcagtagctgaaaaccacaaccaactcaaagcaagactgacatgcaatgacaacaacggggccttccccaggtcacaggattctaaccatctacttgagtgtgggggctgtagctgctgagcatttagaagcagcctgatttcacagataactgaattaaagcccttggggaactttgcaatgatctaatttaagtttatgagtggtaaatatgagtaatacctaataactcatttagcatattactggcatgtagtccttaaataaacataaacacaaaagtcttgggattgcattctatccataagaattcagagaggattttcatttgagaggtactttgtacaccattagtggcctcagagtgaatgtgagaatctctgccgcaagatagtcatgaaaatgtcaggctgaaccaaatgcccaggtgggggagctgggagtggctggtacccagaaaaagcttttgggctccaaggagaagttgaggactgctactttgggggtctgtctttggcacaggcaggcagtgttggtctaagaagagtgtttgtagctcaggggcatcacaatctgaggattggtcattcattcatttgttcacttgctcaacaaatcactgtaataacaagcaatagcagcaacctccatttatagattgcaacacatcttgcgctttgcaaacttcatctgtaatagtcaccaaaccctgtgaggaacgtatgttttatgcccatttaacatctgtagaagcaggcccagagtaattctcccaagttatcctactagtaaatgatgagactgtataggaatctaagtctgtgttgttcaaagctcatggtaacatctttggatgaatgagtgctgagtacctaagtgttgagcctgtgcaggtacagatgccattaataagccacctgtggagatgccacgccctggtcctcaacatggaaggggaatggaagccagaataaaaaccatggcctgttcctgaaaagccaacattatttgagggaggaaaagctatattatattaaacatgagcacagaatggaatagaatgcaaaatatccaggaaatttgtaggcaaaacatgggacttcgaaagaaaaccttgctcttgccctggggccacctctgtgaatcctgggagagttcactcagcttcaccacttggggcccttaacagtggaaatttaaggaagcagggttgtgaatagcaatggaaaagtctgattctgaactccagtgctgaggggctgatgtagggaagggattgtgagtagaggtctcctttatgaaattactacctggggaagcgtctgccctagactcatgccctgtgtcagggagacttctgcccagagcaccaagcacaagtctgactttggaattagagaccagaattcagatcttggctctatcctatataactgtgtgacattagcaagttcttcttcatctctaaatgggaatggtgaaaatattaacacatgcttcccaaggttattatgagattatttgtataatgtttattatggtttgaatgtttgtcctctccaaaattcatgttgaaatttaatctccaaagtggcagtattgagaggtgaggcctttaagaggtaattgggtcctgaggacactgccctagtgaatggattaatccattcatggattaatggtctatcatgggaggggaactggtggctttataagaagaggaagcgagatctgaactaacacgttcagccccctcaccatatgatgccctgtaccaccttgggactctatgtagaatcaccaccagtaagaagggcctcaccagatgcagtccctcaaccttggacttctcaccctccataaccgtaagaaataagttccttttctctgtaagttacccagcttcaggtatcccgttataagcagcagaaaatggactaagtgtttatgagagcatcactagtaaaactttctgtcagtggctttgaaagcgtggtcctcatcccagcagcatcagcaccaccgggggaacgtgttaggaaggcaaattcttggaacccgcaccagagctagagaaattcagggagggtcagcaacctgcctgtgttttgtaatcactgctttacattaatgtaaggaacaggactaagaagagaaacttggagtatctggagctatttctttttcttaatggggaccttaagcagacagattttgggtctgtcaaatcagttccactttcctgaggcagtaaaacattatagggaagctggaggcccatgactgccagaaaactgtcatcatgccacactcctaaaattgtcatgttatgacttatattccctgcagaattttcctttctttccaatctggatgtgtttttcatactccttctataacattttgtgcaaaatattcatctagagaaggcatagaacaggtaagattttccatcatgaagcaaatggacaagaaacaaaccaaaaatccaagaaggtaagaaaatgacagctccattaaggctagcagctcattcccacaccagaaatggacctgtcagcgaagagacattgcagagccctgggcatgagtatggggcttgggcaggtctagaaagacagctctgtaaaaatgcctaggtattgtggtgatagcggcgtggtatgtacgtgtgtgtgtgttttaacagtaaccgcaacaaaaccccactaaagagaaaacactcaagtttggaacggtgtgtaaaaccacgctcagcttggtaagttcccatggagtagaaggaacttgaggtcagccatccagtcatcattctccacttcatgaagcgcttgtgttctccctcccctctctcttctgccaacgcctgatctcctattctctaattctcctttccttttcctcatcccctttttgtttcccataacaacataaacagcagcagccgcttactgagggtctactatctgttctatattaatgcaatccttaaaataatctctcaaggtaagtaatattacacctgggaccaggttccttgcaggaaactgagcaatcattcaaacccatgtctgtctgaatgcaaagcccatattcccccaccccaccctgcatctgtactgcttctcagacctacagagattattagtaccatctctagattgtaaactgatggagggtggatttactggttcattccagaaacctagggctgagtttatggaaggctctgggtagccaggtgcctcttcctccaccaaccagcagtgtcctaatgggcgattatgtagtaatgattcggcactgtggacaacagcatctagaggtgcatacacctcatgcctagcccagacaatatgtccctggatggcctcctctaccccagaggtgtctagaacccagtttgaaataaatacttcattaatattcagtaacctttacaatgtgacagatggtcctaaacaacttgcacaaattagctggttgactcttcataacaactctgttaggtggatacaaatattatgctcattttaaagctgaggaaactgaaacacggaggttaagtaacttgtcctaggtcacagagctattaattaatgaatccaggattccaatcctggattggaattatgttatatgacacaaagttaacgggcattggcttgtggcagtacttggcataagaaagtcatcgagaaaatgcaaatatatctgtaataattttaaacattgtcatttgaataaagtacaacattgaaatcatttcacagggcactcataaaccccggttacagaaacaccacagcttgatggggtttggaaaccagaaaggaagaacaaattaattttctaaagcaaataaaaggtgttgtaagacctggagcccttgggtctaacccaagtcctggtatttattagcttgcccaggctggagtgcagtggcgcgatctcagctcactgcaaccttcgcctcctggattcaagcgattctcctgcctcagcctcccaagtaactgggacaacaggcgcctactactgcacctggctaatttttttttaatgtttttagtagaaatggggtttcaccatattggttaggctggtctcgaactactaaccttgtgatctgcctgccttggcctaagcagtcagttctactctctatgcttcaagtttctcatttgataattgtggtgagtgaaataagtaatatttaagctctttttaaacagtaatttcattttccttccagaaatgttagacataaaccctttactcttgccacatggtatctcgtgccaccattttaggctggggaatgccttttgttttcatattcatttaaagtatactccattggatggaaacaacagtaagatacttttgccacctaccaaattgttaacaacttaaaaatagttaatatccttgttggtagaaaggaaggaaacagaaactgtccaatgctgctggtgtggaagtaaattagccaaggtaacgctatatgccaatagccttaaaatgtacatttccatgacattttagttctataagtttatcttaagaaagcaactatggacagtaataacagtatcactttcgcaactactactattatttccacaagatttcacctcccaggacatttgtggcagcactgtttaaaatagcaaaaaatcgaaacgatttaaatgccacacaatataggattaaatagcttttagtatgtacatctaaaatattaaactatacatatttgtagtaggtgctgaactgtgccaatcagatctcccagatacttgggagtggtgctggcagacagctctcacctgtcaattcttttcaggaattgccttaactctaaaaagctgccttgtccaaggtcatgtccccttcttgggcagcccacacccagtgactggatgatacacagtggtacggtataaaagcctggtcatctcaccccaactgggagcaactctgcaggaccatctcagtccaacttctcccttcaccaagttccatttctgtcctttcccttccacgaagggtgatcccaagcgtactccctaataaaactcattaacacttctgcatgacaatctccatctcagaatctgtatcccaggaaatttcattggcagcaatatgaaaattaagaaaaagatccatgcattcttaagtaactccatgtttaaaaaaaatgtaaatatgaagattttaaatatcaatgtagtagattacaatttggttagagcaatgcttaaaggacactttgcagccttaaataaatttcttagaaaacaaggtagatgaaaacaaaaatgaatgaagcctccaactcaagaagctaaaaaagggacacaaacgaaatctaagtgaagccagagagggcagtaataaagataagggcagagattatcaactagcactcaaaacaaaacaaaaaactggacagttttggttaaaagcaaaagtccttttggttgttaatattgttgaaaaatctaataaaataggcaatcctttggcagagtatgagacagagagagagagaaggggaaggaggaggagggagaggaagaagaagaaccagtagcaatatttggaatgaaaaagaagacataactataacgtaagagattttattaaattatgagacactactatattcaactttatagcaccactttcaagaacctagataaaatgggaaaattctgcaaaagtataagtgatcaaaagtgactcaagaattagaaaagcctgactagttcaataatagataaaactgaaccaatattaaaaggtctacttgccccaccctcctggcccagacaatattacaggcagttctaagagtcatcaaaaaacagataattcttctcttacataaaccattccagagcatagaaaaatatgttaagttacaatttattctatgaggctagcataacccggtaacaaactgaacaaggaaaatacaaaaacaaattatagaccaacctcatctaaatagagtaaaaccccacataaaatagtaaaattcagtatagcattaaaagaacaataaacagtttatttcagtaaggcaagactgggtcaatgttataaaacctatcaatatactatattaatagaatataagagaaattcatatgaccatctcaatatatgtagaaaaaaattaacaaaattcaacactgaaatataataaaaaaacaaacaaaaaaacaaacaaaacctttaagcacatcagaaggtaaatgaaacctcctttaacttcatgatggctatcctccaaaatcccacagcaaacttcatatttaaatggtgaaatactagaagcattaccattaaaatcaaggacatgataaggatgcatgttagaaactctactattcagcagtctcagtctatgagagatcccagttaatgcaattaaataagacaaaattagaggtatataaattggaatagaaaaggcaaatctgtcattatttttaagtgatatgatagcaaacctagaaaaaccaagagatcacataaatataaattattaagggatctcagcaaagtgactgacacaaaatcaatattaaaaaattgctgctttcctttacactagcaacagccaattaggaaatatagcataatagaaaaagatctttttcaaaattttaataaaaagtagaatgggctgggcacagtggctcatgcctgtaatctcagcacttagggaggccgaggtgagcagattgcctgagcccaggagttcaagacaagctgggaaacagggcaaaaccctgtctctacaaaaaattttaaaaatgagctgggtgtgatggtgtgtacctgtagtcccagctactcgggagactgaggtgggaggatcccttgagcccaggagacagaggttgtagtgagccaagaacgagccactgcactctagcccaggcaacagagtgagaccctatctcaaaaaaaaaaaaaaaaaaagaaagaaggaaaagtagaatgtacattggagtgaatctaacaattaatgtgcaagaccttcatggagaaaaatggagaaacctataggcatttgtagcaggacaatagggaaatctaaataaatggatacatattttattcacggataggaaggcttactttagttctggtacttactagctacgtgactggtaaaatttttgaaatctttgtctatctaagccctagtttattcatgtgagtgataatggaatctcccttgtggagttttttgtgactattagaactagtaaacgtcattttaaaaacctctcaaaattacatgcaatatttgtagtggtacaaatattcttatgtaactgaaaaaagagagatgtgaaaggatgtacatgaaatgtaatcatggttacttccaagaaatacataaagtttagaagttgaggttttgttatctgtaactttttaattcttttttaaaaagggaatgtattaatgtattatttatactttttaaaaatttgaaggaaagtccttatttctactatctaggtctgcttctttctatttttttctggcacaactcaatcttttcaaagtttacgtacattggttagagatggaggcttacggaacattgacttgaaggcagatacccaagcagttactgcatggaacatatcaatgtatactatgtatgaacatgtgtaatgtatgtgggcttataggataaacaatatgtattatgtcttttcattctttatgagtattatttatatacatgagaattttagtatctgtgaacgatgcatgaatgtataccattgttaaataaatgaatcaccttcacctaaagttcccctacaccagaaattatagaggacttattctaccttgaaatcctgttctatcttctagttagtttatcctttcctataaagttggttaaaataatgatgttcaatgggcaattatgcttgtgcatttatcaagcttttagtatgtttaaaatactctgctaggagctatgggggaggcaaagatgaattaggattaccttagccatcagtgaacttaaagcccattggggatatcacagagcttccataaaagctatagtactgagctgtgtgtgctaagggctgtggagctcagagaaagaagagctcagacagcgatgatgttgacatggttgactgagaagaaagagcagaaaagactcctgtttactaactgtgtcttacatgcctccaccggagagaggaactactaaaatcaaaacctcaagactcctaaattggatgtaactttaaaagaggttttttcatgctatgagattatgtttttgtattttcaatttcaataaaaaatacagctaatgggttcctcagttcaaactaattaggaatgtgctatttcatttcccccaaatcttccaaaataatgagcccagcttactgaagcatgtgtgtgggttgtgggggtgggtggtatgccaagaggcctgtacgctggggcctgtgagatattgaaggtttctctgctgctcctttgtaccactggcttctgatgtggagcacaaagtgtcagcagtacccggaaatctatatctgccaggaaacagaaaagagtatcaccccaagctccaacaaacctgagtcagcatgtcctccatgacatttcctatatttgtggtcttgagcatactatttattctacctaatctcttgagcccaagtttcctcatctggaaaatgggaatagtggtatcaccttacacagtaggattaaagataatgaatataggtttcccagggccgtgcctggcacaggtctccacagatgttaattcccttcccttcctctttatcagacacaggtaaatgtgccaagattccctgaccccttgagtgtcctcataaaatggagaagtggtttaaaatgagagaaagtatgaatttagagatgaaaaatcttcgaggaagaggatgggagggaaagaagatgcttttcagtaccagctgtagaagacaaaacattgtaaattttcaccttcatctctagaagctgttaatgaataagtaaatttaaaaaactataaactttatggaaacatctgcttgcaggggttaggagtggctggatgtgtgggccagactaataacactggaggggttgggagaagagcacagagttagtcatttggctgaatgtgtttaataaattacaacccaattggagggactggctccctgggtgagtcactttgaactaggcaaaaatagccaacagaaaccagccccaactaaagaaaaataaatcattttatttgattgactgacattgttttgatcagagtgtgaaatcacatgctgagtttagtttggtcagaaagccaccctgttgctgatggaatcacatgcacatattcattcctctaaccacttgctagatgtaacttttaaatatataaatactctactctcaaacttaccttcctcccacgtctatctccaaaactaaacaactaactttttcaatgaagaagtcattctccacatttcctgggcttgatacattggctttatttacctttagtctccttcccctctctgaaatctcaataccaaatcagacatcaattcgccaagttttgtcttttatctttcagctctgcccctttctctccattaaattccttgtaacagcacctccagtttctgggtaggggcttcttaatggccctagcaggtctctggtctcataactatcttctcactcattttagtctgttctgcacatgagactaccgaaaaccacaagcttcaattattttccaggtcaagaactaaactatcagtttgtgttcagtgccttttccaagtattcaaggtactttatctcctaggctaactggatctcccactagtttgaggggcgagactgtgaaggacttgggaatagggataatgttgtcattgttctttctgctgatcattgggattctgggataacaaagaagcagatatcactaagtggctgtagatttctggaccatgatttatcatatgctggaagggtaagttcatgtctggtcatgaaggacttgcatctactaagcatgggggacatgtatttagtacagggtgatgagtaagaggatcaaagagctgggatagagccagatgcagtggtacacaactgtagtcctagctacttgggaggctgaggaaggaagatggcttgagccaagaagttcaagaccaacctgggcaatatagtgaaaccaccaactcagaaataaaataaaatataaaagagttgggatgataccatgataccatgaatctatccaggaactgctggtaaaacaaagacaagagagggaaggtacctggtgacacgtacacatatgtatacataattataaagaatactagagaagtgtctgttcatgtccttcgcccactttttgatggggttgtttgtttttttcttgtaaatttgtttgatataaagacacatgcacacgtatgtttactgcagcattattcacaatagcaaagacttggaaccaacccaaatgtccaacaatgatagactggattaagaaaatgtggcacatatacaccatggaatactatgcagccataaaaaatgatgagttcatgtcctttgtagggacatggatgaaattggaaaacatcattctcagtaaactatcgcaagaacaaaaaaccaaacaccccatattctcactcataggtgggaattgaacaatgaggacacatggacacaggaagggtaatatcacactctggggactgttgtggggtgggaggagtgaggagggatagcactgggagatatacctaatgctagatgacgagttagtgggtgcagtgcaccagcatggcacatgtatacgtatgtaactaacctgcacaatgtgcacatgtaccctaaaacttaaagtataataaaaaaaaatactagaaactacattaatgggctgaatagtctagacagcaagagattgatttgttacggaaattcacgaccctaaggatagagcacctagagatatcatgagtgagcagaatatggtaaagaacacatgtgagttcattatgagcattttctacaggccgcttggccacaggaagaaatggagggtggattcttagccactgttattctgtcataagggaagttacagcagtgaaagtggtcttgtgctgactgaacacttgcaaaacgcccttttcagctaaaaatagcgcatcagacaagtctcttcatttcccttgttgacatggaataaagaagcttaactagatacactcctctgtctctcattctttatttttttatttgattttttgttttgttttatttctgttttttttctctcggtccctcattctgaccaacagaaagaccctgcttggtgaagcaagcagaagagacatattaggagaaacaagccactccagctcagaagacatgattgtcaatgaggagaaggctggctgtaataagtagccaagaagtctagatttaggcagtctaaaaagttaaaaagaagatagttatgattagatgagattctggaatagaggcagcctgaagttttccaaaatggggaagcgttcaaaaatcattccaataaaaagggaaaagaaatggtccttttaaaaaatgtgcctgcaggctcacccacagattcccatctgaaaaagacacttagaaaaaaaggaaaagaaaggcacacaaccaaggaacatataggaagatggcacaaacttaaacggaaaaattataatgtgaaaaaaatagctgaaagtgatctgaaatactaaatgacaataacaacaaaaaaccccactatgggccaaaaaaagttggaggaattctgggaactgggccagttcattttagacccataagagcaaagaacagcttagtctatcgcttgtgaacgaggattaccagaacctccatggaggctactgaaccactttcgttgatctttgaagaattttggagaaaaacaacaacaagaagccagaggaccagaaacaagcaaatctaatcttctttctttcttttctttttttttggagacaaagtctcactctgtcatccaggctggagtgcagtagcgcagtcttggctcactgcaacttctgcctcacggggtgaagtgatcctcccacctcagcctcctgagtagccaggaccacagatgcgcaccaccatgccttgctaatttttttgtatttttggtagagacgggatttcaccatgttgcccaggctggtctcaatttcctgacctcaagcaatctgcctgcctcccaaagtgctgggattatgtgtgagccactgcacctggactatcttatttttattatcaaaaaagtggaagaaaatatattccacaaactatcaacagcgtgagcatgatactagtcttagctaagaatccaaatcatatttttaaatgattttaaaataaaaatcacatatcatctcattatccaactataatgacaattaacattttgctgtaaattctttctagaatgtatccatatatatgtaggcatctctttaaaaaaaaatttcaaatttgttttagctctttttgtctttttttcacttagcagtatatggtgagcattatttggtgttactaaacattcctcaataccagcaaaacaatactgttttccctggttacctagtattttattgtgtaaatagacataatttattgacagttccctctgctgttgtttatctttaaaatccatctcttgcaactcaaaaccacaatgagatgccatctcacaccagtcagaatggttattattaaaaagttcaaaaaaaccaaaacagatgctagtaaggttgtggagaaaagggaatacttaaacactgttgttgggagtgtaaattagttcaaccattgtggaaagcagtatgcagattcttcaaagagctaaaagcagaactaccattggacccagcaatcccattactgggtatgtacccagaggaatagaattcatttgaccataaagacacatgtgtgcaaatgttcactgcagcactattcacaatagcaaagacatggaatgagcataaatgctcatcagtgacagattggataaagaaaatgtggtacatatacaccatggaatatatacagtgataaaaagaacgcgatatgtcttttgcaggaacatggatgcaggaacatggatggatacttagcaaagtaacgcaggaacagaaaaccaaatgctacatgttctcacttacaagtgggagctaaatgataagaacttaaagaacttatgaacacaaagaaggaaacaacagacacggattctacttgagtggggagggtgggaggaaggagatgagcaggaaagataactattgggtactgggcttaatacctgggtgatgaaataatctgtacaacaaccccccatgacacaagtttacctacctaacaaacctgcacatatatccctgaacctaaaataaaagttaaaaaataaataagtcaataaaattcatttctaacagaaactatgacttttactatttttgctttgaggaacctgctgaggttttatgtataacctgatgcaaaattaatttttataaatgttctacgagccctagaaaataaattttattatgtgctttggatattacgcagcatataattttttcagtagtattcattatattacacaattcctgtatttatattatgttttgtttgtttacttgatatgtgaaagcctgagagtggtgttttgatatcttccacctctaccgtgtttccatcagtttggggtgcaatattaattgatgtacatatttccatggccattatatcttcactgtgaatttgattcttcacttatagaaaacaatcctcattgtattatttaatgatatttgtcatgaattgcattgtcttatatcaataaaatgacttctgctttagtttttgtggcatctccctgctataccttttctcagtgttttaatttttgcacaacactttgttttaagggttcctatggtaaacaacatagagctgaattttcatttttgatccaatatgaagacttttattaaaaatgagtgatttagcttacttatgttaattgttataactgagttgtttggtgtcttcattttcatgctctattttattatcattttaatgcttccttactgtctcctttgtttaattaatatttagtttgctgcatagagtttgttttcttagacccccttgattcagaaggtgggttattgaaaactctgtaactattgtcttctaaatttaagtgtcaggaatgaaatgacagtctcataattgaaccaaggaattcagaatattttattttcactgtcttatcctttcagacaaacaccagtcttttcaggctttgaaaattattatctggggttttaggcccaaatttttctcaggattttttgtatcaatgcatatctactgtttgaatatattttacttttgcatatagttttgttttgttttgtttttgagaccgagtctcgctctgtcgcccaggctggagtgcagtggcgcgatctcagctcactgcaacctccgcctcatgagttcaagcaattctctgcctcagcctcctgagtagctgggattacaggtgcccgccaccacgcctggctaatttttgtatttttaatagcgatggggtttcaccatcttggccaggctagtcttgaactcctgacctcatgatccacctgcctcggcctcccaaagtgctgggattacaggctgagccactgcccctcaccttgtatacagttttaaaacttgatgtacaaattattagttagatgtcttttttaatttgcttcagtactagttgcctatcttttacactgtcacttccttcacatgcttggtttgacttttgatagaatactctgctcattaattgcagctagtgaattttaattctgctgttgtgcttcaatttccttgcagtccgtccatatttcattcacatctttgaataccatttttcattttcatctcagctttattcttattgtcttttgatttgtaaagaccatgccctctagtgccctcttatgaggattctagtctactaaaatattcttttaggcccagctggagtaactcattttcatttcatatgctattatttactcccttattttacatttcctttaattcctatatgttttactctttattcattcttaaagaaggaagcattctataaacttggtgcttgtcaaacaacaggtctttttggtcttgttctcactgaatgctgaaatcaataatggtgagtggatgtacacaggtcttagacctacatcaaatttcaagaatagattatcctagagtaactatgctatactatactatactatactatactcagttttatttgcctcttactgccagaacaagttctacattttttgaaatgtatcataatttttttacgatgggatcaaaatatctcaatatttcataaacattttaatagattttttcatttcttaaatgtaaagtcccatatatgtccattccatcaagctccttatagccttaaaacttttatacactaatttgtttttggcactcaatttgttgcagattgacagatgtatgttagattttccctctgcaattgtgttttgacaattttattgtatcatttaatgatttttgtattaaattttacttttagctatagtttaatactaatatcaccctcctttctttttgtttgcattttcctgatatatctatgtcccttcattttttatccctttctctcccattttgtttaaaacagcatatatttagaattgggttttgaccaatgcgtggttctttgtcttttaatagaaatgattggccaggcggggcggctcacccccgtaatcctagcactttgggaggccgaggcgggcggatcacgaggtcaggagatcgagaccactctggctaacacggtgaaaccctgtctctactaaaaatacaaaaaattagccaggcatggtggcacgcgcctgcagtcctagctacttgggaggctgaggcaggagaattgcttgaacccgggaggcagaggttgcagtgagccgagaccacagccgctgcactccagcctgggcgacagagtgagactcagtctcaaaaaaaaaaaaaaaaaaaaaaggaaatgattaaaccattcacacttaatgtggtatgtttgacctggcttctatcatcttattttatactttttatattaatgtttccttgctatttccttttttacgtattttttttcttttctttttttgaggcagagtctcaccgtgttgctcaagctggaagtgcagtggcacaatcttggctcactgcaacatctgcctcctgggttcaagtgttctcctgcctcagcctcctgagtagctgggattatagatgcccaccaccacgctaggctaatttttgtatttttagtagagaccaggtttcaccatgtcagccaggctggtctcaaactcctgacctcaagtgatccacccaccttggcctcctgaagcgctgggattacaggcatgagcctccgcacccagcccttttttagttttcattcttggctataatgttccaaatcttcctcctaattttgaagttaagcatggtatttctagttttatattcatctactgtcttcttatttaaaaatgtatttaaacctgtatttttctgtgttcagcaatgaaacaatattcaatgtttcccacagcacaaaatgagacattcagcacatcaaggttttttgccttgagtaatctgagtttttagccccacattattatcattaagtttcttatgtatcttctttgttgagagtaattttggcagttgcattgtttcctgactatattaataacatgtaaatactaagtctatgtttgtgtgggtttattattcacgccacagctttgatatcacatcttttccattcccaagctttaatgttaatttctctgttgaccagaatagtttgagtaaatacattttttaataaaggattttagtggcctacttgctgggtgcttttttttttttttttttccttgtctgagaatagcttttttttttctgtacaaattactgaatagagaattctggctcataatcttttttttttttttttttttgagatagggtctcactgttgttcaggctggagtgcagtgctgtgatcacggctcactgcagtctgcacctcttgggctcaggtgatccttccacctcagcctcccaagtagctgggactccaggtgaacatcaccattcctggctaatttttgtatttttagtagaggtggggttttgccatgttggccaggctggtctcaaactcctgggctcaagtgactgcctgccttggcctccccaagtgcttgatttataggcatgagccacggcaccggttggttcattatcttactacccccaaattccacagtcatacctcaacttatttctgatatttagtgttgcacaatgtctgacacttgcttattttttctctgaaaataaaacattgtttttctgttttcataccaacagattttttcttataattaataattttcaccagaatatacttttaatttttcctggtacacattaactattttgaagtaatgtcaggaaatttttttttatttaaaaattatttaaatttaagttctgggatacatgtggagaataggcaggtttgttacataggtacacatgtgtcacggtaaattaaattaaaaaaaaaaattagagacaggtctcgctctgtcactcaggctggagtgccatgtcacgatcttggctcactacagccttgaccttctgggcttaagcaatcctcctgcctcagctacctatatttttattataacatcttctattttttcttttcctgaaaaattctgtatttatatgtttaatgtattgaataatagcctccgttttcccctcattatttcactttcatgttttttgtcagaattgtgagaattcatgctcatctttagctttctgcattgttccaatgtttgtgcttccactgcatgattttaattctgcaaaatatttttcatttcaaagcaggcaaagtttcacaatctcagattgctctctttcagattgctccatgttgatagttcctgctatatcctcttaaatctctataaatataacttggagatttttaagtttatgttctctcttttttttagcatctattttaaagagtgacattagctttgcattcttagatgtctcccttctttggaactgctagatattgttttcatgagcttcacaaagagtgagtcccatggccccagcacaaggcacatctgaggggccattggatacgtttgattgagatgtgtttcccattgcctgcctacctagcattcctgtagctcttgccactttttaaagtttttttacatggtaaaatatgcataacataaaagttaccatttaaccacttttaagcgtacagttcagtgtcattaagtacagttacattgttgtgcaaccattgccaccatccatccacagaacctttttttttttttgagatagggtctcactctcttgcccaggctagagtgcagtggcataatcatggctcactgcaacctctgtcatccaggttcaagcgattctcatgcctcagcctcccgagtagctgggataccgatgtgtgccaccatgcctggctaatttttgtgtagtttttttaagtagagatgggacttcatcatgttggccaggctggtctcgaactcctgacctctggtgatccatctgcatcggcctccaaaagtgctgggattataggcatgagccaccatgctcagccttccacagaactttttcatcttgcaaaatgaactgtggcattaaatgataactacccatctttcccaccaccacaccctggcagctatcattttactttctatctcaatgaatttaactactataagtacctcatatgagtggaatgtgcagtattttttcttttgtgactggattatttcatttagtgtaatgttttcaaggttgcatgttgcagtatgtgtcagaatttcattcacatttaaggctgagtaatatttcattgtatacatttaccacattttgtttatccagtcatccataagggaacatttgggttgcttttatctcttagctattgtgaagaatgctgttataaacatggatgtacaagtacctcttcatgttcctgctttcaattttggggagtatatacccagatgtgtgattactggatcatacagtgattctattttcaagtttttgaggacccactgtgctgttttccatagtggctgtaccacttcacattcccatcagcagtgtacaagagttccaattgctctacatccttgccaacacttgttattttctgttcttttaaaaaatatacataatagctatcctaatgggtatgaagtggcatctcattgtgtttttgacttacagttccctgatgattcatgatgctgagcttttcatgtgcttattgctattcacatatccttttttgagaaatgtctttcaagttctttatcaatttttgaattgggtttttttgttgctgttgtttagttttgggagttctctatatattctggactttaattctttttcagatatgcggttttcaaacatttattccattctgtgcagtctctgatgctttacctttggagatgttagtggaattcttctaggagtccttttcatttaatctccaggccaacttttccttccattctgatgacttacagttggttggtctttccctcaatcactgttgtgaacactctttattatggaatgttttcagaacgtctgacatgtggattatattggtgtcctttgctagttgtcagtactataacaaatattcccaaatatttttatattaatttggttatttcagtaaaaatcatggaaggtaagagttaaatgtgtaggcttcattttccatttttaaggccttattttttgaaagtggtatccctgcaccataattaccctaactactggttaaaaatactggttcgaggcccccttcccacacctctggctcagagtctctgaggagagagccttaggatccacgtttcattacaaaagaaatctctaggaagttctaatgcaaatgaaaattagagaactactgggttcagtggtgactcgtgagcagttaaaagagaagggaatgatcccttggaactaaccaaggttcaccaagaagtcatggcaggtgattcttacatcttcttgacaggtacattagttatataactcagggaaatgtggtagacagtggatgtaagtgcaggagacttgacaaagttttcatgagccttgcaggcatgatggagaaatacccattgaatacaaaaacagggacaacacgcaagcaagaccatgactggtgcagatccagtttcggttctgacaccttaaagtagttttagagaaactgtaatgcacatgtaggagatttaccagaggagctaaggaattaaaagctctgtaatttgagaaatcgctgaatgttttgtttagcaatggttcttaactcttctgaacattggcatagttggtagcactgggagacgtaaaaaagtactgaggcccaagctttgaccccagaccaattaagtaagcatctctgggagtgggacccacaactggtgctttttcaaggcccctccccactccccccaggcaatgttaatgttaaacagacttgagaaccactagcttagagagaaagaccatgcttacaaatttgtgagctctaatatggaagatgggcataagtgtttctgtaagccacccccctgcttgaccattcacctggcagaagtggacattggtctgagtcaatagacggctactgggacagctcagttgccaagcccagactctcaatgctgtgagatgtttctttcccttattagataggcatggacctccttgacatggatctttcaggtactggcaatacattgatctagatacatggaaatagactctcccctgatctcatgagttttcacgtttcacccaccacttgcactgaggacttcgttatctgggcctccagccacggagctcatctatccaattacatctccatctggatctctcactgaaacctcaaagttaacgtgccctgaactgaacttgttacctaaccccacacctgctcctgttcctcaattctcttggtcaatgaaaccactatcttcccaggtgtaggagcctggtggccacctttggcttctctgcctccctcagccccctcacatacactcagttacaagttctttcctggttctgtccctgactccacctgtactgccattggtttagccctcatctccctggaactccctcaaaagcctctcaggggcagcctcactttccatcttctctccttctaagacagcagcctgaggggttgctctaatgttaaaatgtggccacgtcagtccccacttatgagttctcagtgcccctcccctcatcactagctacaagaaaaaaaatgcacactttaatgtgacaaacgagaccctccatggcccagctcctgtccacatttccagactcatctcccataactttctgactcacagtttttgctccagcaacactgaagtgtagacaacaaaaactggctttgcatacatggttccctttacctagaatttattaccctcattccttcacttaacttcacgcatcctttaaatttcagttcaagctcatctactccagagcgtattacctgatttcctaggtccaataccttcccaggccgaggacgtgaccctttcctgactctcatctaaagattgactctggctgggcatggtggctcattcctgtaatcccagccctttgagaggttaggagggtggatcatctgaggtcaggagttcgagaccagcctgaacatggtgaaaccccatctctattaaaaacacaaaaattagccagatgtggtggcatgcatctgtaatcccagctactcgagaggttgaggcaggagaattccttgaacctgggacgcagaggttacagtgagccaagatcacagcactgcacttcagcctgggtgacagagtgagatcccatctcaaaaaaaaaagtatatatacacacttttatatatacttttatgtatgtatatatatatatatatatatatatacacacacacacatacacatatatatagactctctatctatatctatatctatatctatgtctatgtctatatctatatctatatctatatctatatctatatctatatctatataacagtggactctgttccactcagctcctggaaacccagttgatcctatcccaagaaatgagtcctatgactagcatgaagtgggtgctcagcacatatttactgattgaatattggttaaacgatggagcatcctcaggagagcattgctatggtttgcatcatttagggattaaagaatggtgtggtctttggggcaccatgggactttttcccctataggaacatatggctactagcttcctaatagttgagaaagatcactttgtgatcatccaggcctgctggacatgccggcatgagaaaagggaagagactgacttccaccagtgaatatctttatgtcaggttctggggatcaggaacatccttgttgatgagacttttggatggggagtttggggggctagatgagagtaaccattttgtgtggcttccaaggaagggacaccctggccttctgggagctggaaagagctttctctagcttatttactttaactgcaagtcaggggcacgacggagctggtgaagtactatgagccactgttcccagagcagaggggtggagaaatgcagcaggaaatggaaacatttaggccaaaaacatttcaagtatttcagcatctaaggatcaaagtggcctcactgacctttggctacttggaactttcacaccagatcagccatcagcaaagtgaaaacttggtttctctgcagacgacactgtttattcccaaggcgagaagaaaacttccaacgcaaaacacacagaaaggagtgatggacccaaatgattaactgggcaggcaagtctgggttttgtcagctgctgtctggccattgagtttttctcttccatcccttttcttgccacagcagacttttctagatgcctccatttttcacttggaaaatgagagctcttaagctctttccttcttttctcttacacatcatgattccaggaaagaatctttaactttcactgaagcatcaatgacttaagaagcgaattccaagaggagaaatagatatttttgcaggaaataaagccttaagcttcttcagaaaaggaagtgaaaagaggagttatgccctggagaaggcactggtcagagtggtgagaccctggctcctattctggctgggtaaccccaggcagggcacttattatgttgggggtttccttatttctcaggatgaaggcttagaaccagatgttctcttggctccttctctgatctcattttctatgacgccagaaattcttagatctgccccaaattaatatatatctctaatcctaattgaataacatcccagggtgctgagacagtgtgcaattgaggtaattagaccatgctccttaatttgttcagaatcatagagttaaggaagccactactatctccatcatcaccctgcccccaaccaccattatcattatcaccaccatcacccccacaactatcaccaccaccatcaataccaccaccaacaccactatcgtcaactccccacacaactaccatcaccgctaccaccaacaccaacaccactaccaccagcacgatcatcatcaccaccattattgtcaccccccaccaccactaccatcaccactatcaccaccaccaacaacactactcctaccaccatgatcatcaccaccaccaccactaccatcaccactatcaccaccaccaccaccaccatgaacactactcccaccactatgatcatcaccaccattatcataacccccacaaccactaccatcaccactatcaccaccaccaccatcacctccactgccactaccaccatcaccactatcaccaccaccaccaccttaccaccattacccccaccaccatcaccccaccactaccaccaccacaataatcacccctactactgccaccactatcaccagcaccaccaccagcatcactgtcctaccactaccatcattaccccattatcaccatcaccagcaccagcaccagcaccagcatcactgtcctaccaccagcatcaccaccaccattaccaccatcatcaccaccactaccatcaccttcatgagaaataaagttctactttttaaaatgggaaaatttataaaaatgtcttaatttgagggactgatgttaattccagggaacattctggaatgggatgtggaatgagcttttaggattgaagctgtgatttcaaggaaccagcatggaatcactgaaattagtttatgtcagaccaacaaaattgcttctttgacaagattattggacggaagatcaaggaaataccagtgatgaagaatatttggagtttatcagagacctttgataagattcttctaataatgttgaaaaagatgaagaaatatgggctcagttatagtacagaaagctgaataaattttctaagtaagtgctgtttaattattgaattaatatctatgtttagggaacatacagtggaatgcctcagaatcccatagtgttcattatttttattgatgacttagatgaagaggtcgtgctcatcagattcagagatggcaggaagctggctgagagggccggtaaatacactggatgctagaatcacagccagaaatatctgggcaagttggcgaggcagactgaactgaacaagataaaatgagaaacaatgcacagtctctagagtggctgtgagggggtgtgggcaagtatcgggtgaaggcgagcaggtgggcaatgcagttcaagagcaagtttaaaagagaattgggttacttcagttgatattaagctcaacaggtgtcaatggtatagattcttaattagaccttaaagagttttaatagaaataggaaatagaatgaggaggtggtaatttcagtcttctccatgctgattaggactcccttgaaattttgcactttattctttaagaataaagaaattagagaaaactaggacaagagtgatgataataatagtgagggcactggagcaaatggcccatgaggtagggtggagcagtgaaaagggcgttggccagggatttgagagccaagttaccccattaataggttgcgagatcttaagagctggttcaggactccctgaggagaagcacagactatggtggttgactggtctgctcttgtaggtttttggttccccgcccttttcccccttctcttccaggggaggagatggggccagcatccaccaactcccatcagtaggagaggggagagttgctggcttctgggttctttcctcgcagaggctcatgcatgcacagcctgggcctctgggagtgtccaggttggagggatcctcgccatctgttgatggtgttgtgtggggagttggagcagttgggggagctggaacagatgatcttagtagttactcccatctctgagagtctagatttcaagacacgctgaaatcaggtcaggccacactatggatgggttcctttctccctccttcacccatccagggacaggttctcttaagaccctgagcaaaattttgcactcttgatatgtgattcagagtcataaattatacccattgtttctcttggaaagctttcaaaagtcccctttctgtgatttcccaggaagccaagatggtggcaatcctaatccacatcacaacacacagcagttattgaggcagtaaagcaaaaggtccaagaaaaaaagagaagataaataaagagaaaaggctttgaaatcatatagacctgagtttcaatctcagtctctcctatcagctttgtgaccataggcaaattactgaaactttctgagactcagtttccttatctgtgagatggggttaataccaggagtgtagtgatgtgaatatcaggtgaagctatgcgtgcacagaacatagcccaatgtgggactcagagtcggtgcccagtaagtgctattgctaatattaccacaacatttactaccaccatccctcctttatctttctctccctcatctcttcggggctaggcactgtgctagtgcagaggatacagtggaaaacgagacagacatagacacacactttgcttgcaccaagcttacactgtagcacagtccagttaaactttttgcaatgatggaaatcttttaaatgtgcattctccaatatgatagccagaaatcacatgctgcatgtaagcactagcaatgtgactggtgtgaccgaggaactgaattttaaatttcatttaattttaatgaactaaagttaaacaggaaatagtcacatgtgaaaacagacagcacagctctagacacctttcaggtatatttctgggactgactagcctgagcagaataaaggtatgctgaaagagaaatgcacgtaaagcatccagtacaggacctggaaaattctcttattcgttcattcgtcacatttaattgttgactatggattggcactatctcaggtgctggggatacagaaaaggattagacatggtctctgccttcagggggctcatagttcagtgggagatatgcaaatagtgacttcgccatagcgaggtaagcttacgcacaggtgctgtggattcaggacatctctagggtgggcttccctgaaggatgtttccggacctgagctgaatcttgcataaattgatctcagagtgggagcaacaacagattatattccagggctactaaacccactgctggtggcagaggtggcttggagatcaacgaggctctaggaacaactcatagctagggccagtttgttttcttctaaccctttgtgtgtgtgtgtgtgtgttttgtattgcctaattcaatctctcttctgccagccacattttgtttccacctgaggacattttttttaaatgatgggtataactttatttttaaattgttttattactattaatagttactagccttgatttcttttttttttttagtcagacaaactctgttacttataaagtgacatcagctctcactatggttgggtgtggaattctgatacttggtacaaataaacaactctttgaatatggccagtatgtgaggaagctgttgctgatgggttaagcttgctgaacctggctgtgatcatgatgcacgttcacaagagtgaatgttgttataatgacttgtatggagaagtgggacattatacacatttgtatattttacatgatggtttgatttgttcaaagttagtatgtgacatttagctagagaattctgcagctgatacttgctcacataaaaataggtatagctttatgttgtatggtttccataatccctcccgagtgtataaagcaaggtgatatgtgtgattccttcttccatgagactgaagaatgctcgtgtgatgtggcttggtcgtgtgaggccttggcctatttggattcctaaaggtcatctgcttgaactatggccgagttgtttctggtgaatggaatcctaaattagtgtaccctttttgaaaagtggcttctcatatatactgtgagccttaaaacattcatgccctttggcctggtgatctatttctaggcatctatccaaaggaagtaatgggaagtgtgtgcagtaaagactttgcccagagttatttgtagttgctaaagacaggaagcaacttaaataactaacagtgtaataatatgcagccaggaaaacaatgttcatgaaggtcttttgctacaacactaattcagaaaaaagcagagaaccaatagctacaggggctcagcaaccatacttttgagtcagacagcctgggtttgaatcttgattctgccacatactagctatgtaacttgggcaagtcacctgaagtcttagaaccctagaaaaatgcaaccctagaaaaatgggattgatagtaataacacctcagagggactcctgaggattaaaggatataatgaatataaaatttaacaccatgcaaagtatacttattaggcacccaataaatgctggctctctatggattgtataatttcgaggcataaaaacagatggaaaggaaatatgccagtatattaacagtgtgggatgggagtggtaggatcatgggtgattgatttgttctttgcatacttttcaacttcccaatttttaggcaatgaacatgaattacttttatactaaaagagtacattataatgatgtaatacaataagatatacattttaaaagttttaaagttttaccacaaagaaaaggtacttccccgcccttttcccccttctcttccaggggaggagatggggccagcatccaccaactcccatcagtaggagaggggagagttgctggcttctgggttctttcctcgcagaggctcacacatgcacagcctgggcctctgggagtgtccgggttggagggatcctcaccatctgttgatggtgttgtgtggggagttggagcagttgggggagctggaacagatgatcttagtagttactcccatctctgagagtctagatttcaagacacgctgatgtttgtcgttttctccccatgtctcggttgatctgaaccaaccactccataaaattctaaggtaggaaagactcatctactagcttcccaccctaaagcccctcccagaaaaatacctgtagtaatgcctatagtgctgggtgtaaacgttaagggtgattggcaaaaaagacatagatcaggagtacgaccgggaagttggcttagttgcagccgttttatttaaggagtataattcatattcggaatggaatctccagcaaatgtagtcttttaatatgacaaacagttaagtaccttcccatgttagacacatgcctggaatgagagtgagagggacataaaatataaaggggtgtgtgtctgtgcctgggttcatgaccaaacctcgacatttgccctctatgatctaatttccttcattgacaaccagggtgccctgtgtgccagcaagtggctctgccagctgtattttacagacagagaatcccaagcaccaaaataacaaagttgattcccccatccagaccagaggggtcgtttccagtcctgtgtcctgaccactgtctctcatcatgacccctggtgttcacctccagatccaaagtgtcgtcgccaagcccccaaaataaaggaatgacaaacagccctcccaggccctcctccccacagagaggtcatcgtatgctaatgaagtccgaggaggcagcggcgcagcgcgggagagcgcgcccacgggttcacagcgctcccgggcaccactgcggcgcagccacagatcgcttcgcgctgcagcagacgctcccgccgcggggggcgactgggggaggggtctcgaccgccaccctgagttccgcagctcatccctcccatctgggaggtggttctagctctagtcccaagctttccactgcagtgatggtggggatgggggcagcacgtcaaatcacctgtagggctttttagaactccacagccccctcccctaattctattccactagttcaaacgaagaaaatctcagactaggcaaggggaggtggaccggtggagtctgcgaaagcaccacaggtgactccgggtacgcactcctcaggacacaagcacacacacggacacatcttgtgactctgagactacacagatcaacctcagattcgacccttccctcctttattctctgaggtgtccgtgttcgcttcagcttccctttaagtcgccctgcgcaggggctttgtggagtgcccccaaagtcctagaaccccgcgggacggtcggaggctttggcggccagacattaggaaaagcatctcctgcttctcggactgcctggagcgcgaactggatatcaaggagccaaggttaagtccagaagaagaaggaaatccgaccagttgctttagcaaactgcctggagcaaggccgcctcccacccgcacagctttgaggcttgagggggcctctcagtcgcagagagagccgagccccaccctgtgcgttccccaagcctgcacccctcgagcggggcatcccttcctgcagggctttgtggcaggtggaactgtcggggtgggcgccgtggctttggctgcagccccttccctggccgcgggaccggctcccgctttgccctcctttaccaagttgctgcaccgggtgctccctgagccggggaccccctccgccgcgccggccgccgtcttacctcaccaggcaacacttggttgcgcggtggcccggggcgctccttcttcgcggtttattcccttacttgggaggaaagaggaaccgagagacagaagggggaccgaagctggcctctgggcgtcttcccgcctgcgcagccctctcgggggagggggatgcagccccagtgggtgccgcggagaccaggctgccaggctgtggttggtagcgccggggtcttcaccctgtgctcggagttcagcagctccaaagctgtctatctccgtggcccgctactacggcactgcggctctgtgccctgcccctcgcagcctggcaagtccagctgccactctcactgcggagccctgcccccgggcgcagagcccgcccccgccacacacaccggcgcgcgcgcgtacacacacggcacacacagacacgcgcttccacacatgcacacgcgtgcgcacacacgaatgtggatccgctcgatgggaacctgaccccctttggtgcaactagggcgcgggcatcattaggacgctttttactgacagggcttcggtttgggaggaggagttacaggcttaggagtgtggagaggatgcaacagtggtgggtaccagagggcccctgaccccggaggcaaaggacaactgtttgacaaataaataccgactgggcgtttccttttctcaactctggtcaaggctaccgtaatatcccgaccaaatcgaagaaaaaataaaaatacaaaatcaacaagttctctttgtttcccaggaactcagtatctctaggatccaaatcactagccctgtccagagggtcatttctgacaaccttgacttcggtggcagtggattggtggcagttcaactcgaaaaggttttcccctcgtagcctggtggagactggcacagcctgcctgagctggactctgttggatgggtcgggtctctgggtgtgtttaattcccattctcctttgcttttaggtgaccttggactgtattcctgcagaataaatagatctcttctttttttaaaatgtagaagagcacagaaaagacgctggggtgaggggtcggggggaataggggagctacattagccaaggcactatgacttgttgcttctctttccatgacgtgcatgtccacgtgagggggtgatggtggtggtgacactatttcaggcatgtcacacagcaagatgactgctgtccatttcacaccacatttagagtcattaggagtttagactgtcatctttaaaatatgtggagtttactcatttccacagccgagaattcttttctgccagtgggcagtgaaggtccccgggccagcactgcagccaagaaaagctttccgcagagtgtggaggcgccgaggggctctgggtgtctgtgcatttggggaagaagcctcaaacacgaatgtcaaacagccctgaggaccctgttgggtggtgtccatactaggctatctgcaggcaggctggtgagacagatgagaaacagagctgagagatctccttaagattccacacagtgatgaagacagagctgataccagaaccccgtgtttgcgactcctcttatcctctgggtcttatccattctatcaccctgggtggcttctcaaagtttccttcagctaggctgaaataatcttggtgagggtgccttcaaagttcttccttgtcctttctttttttcctcttcagtcactgactcattcattttacagctatttattaaactcctactctgtcttcaggtgcttccccgtaactccagtc

SEQ ID NO: 152 - DNA, 74782 bp, Homo sapiens
  source 1..74782: mol_type = genomic DNA
tagtgtttaatgggtagagttttaatttgggataaagaaaatgttctggagatgggccaggcgcggtggctcacgcctataattccagcactttgggaggctgaggcaggcaggaagatcacgaggtcaggagatcaagaccatcctgggtaacatggtgaaaccccttctctactaaaaatacaaaaaattagcctggcgtggtggcgggcgcctgtagtcccagctactcgggaggctgaggctggtgaatcccttgaacccgggaggcagaggttgcagtgagctgagattgcgccactacattccagcctgggtgacagagcgaaactctgtctcaaaaaaagaaaaagaaaaacttctggagatgaagggtggtgagaattgcaaaacactgtgaaggtactttatgccattaaactgtacacttaaaaatggttaagatggtaaactttatgtgtattttaccacatacacaccaaaaaaccttctaagggttgttcataaactgccttgcagaccagttataaagcacttctcctggcctgcacatctctctgctccttgcatctttccaaggggcacagacctgagctggctgggacccagcatttaccattccatctaaaacatacattgtgctcacggatctgcacacacacaaaaattcaatcccatctggattcttttcacgcacatcgcaatctgcaaaatgatacattcagcctggctgtgttctttcttgctagccgtgacagctgcagacgtgagcagttgcttgtcttggagggtagggtcaatggtggcaggaaggacctgtggccctgaggcttggcctgaactatctagagaattcagggcagtaacatcaacacacacaagcatgcagcacttacccaaattccttaggattaaaatatacttttttctcatctagtttagggcagtcagagagagaggaaaggaagggactaatttaaacctacaaaggaaaactaaacttttttctcattctaaaaaacttcttaccatcttgtttctacaaccaaatgattcatattagtgcttggtttactgagttacaaaaaaagttgggtcaaaaggctaaaatgatagaattatttcttaatcaacaatattggaaatgtgtcctaaaaacctggaagctgaacattctgtccacctgcttttagaaaagccaagttcacctcaagaatgtgtcaaacacatcatctaaataatccaagacctagaatgcatcaatcaatgtgacagaatttccaaaaagcagattggaattaagtcttcaaaaaagacagttgttactatataattctacaggtggacatgaagcagaacttggtaaacaaaattttatattaaaatatgcattttcatatgattcaccatggaattgaaacattataaagatcatttctgctaccactatttaaacgttattacccacttgaattgaaaaaagatgaaaggacacaaagtgaacagacgataactttattggagatttacttggctacaattattacaaaaaaaacaactaaaggtaattgtgatccataaggtgcagactgcaaatttctgcagcatgattactgtatgaatgaatgacatcatgttccttaaaaaacagctgcagcatgtgatggtaaatattttattgtcaatcaaataatatgcattagttttacttgattttagtaattttccttcactatttacagcagaaaagccagaaatttacttcctgttcacctttgcatttttgctatgtaacctgctgctgcagtgaattcttagtgcatctataaaatttaaattgtctgtggttgatgtccaaataaaaatggactagaaaaaaagaagtaatgattaaaatatatttacaagttagttgtgaaaaatcattttcactgctagtggaaaatacaatggtctcaatgcaaatttcctagatattgctattggcgtctccaacaactttaaaaatcattttaatagtcttggtcttaaacatatctttaaaacttttcatgtacaatataaaataaagaaatttatctggaaataattaaattcctgaaaagtaatcagtggttggaaaaatataattattcaaatgtaattaaaacaaccatataggtaataaacatgacatgagtttctcttctgcagataatgcaaatgggttaaagactcttaacataatttcagatgcagttaaaaaaaggtatcaaggtctcagtttggtggcttcaatcttgtgtaaagggattagacaccctaacagagcaagatccaatattttaaatcaacggggccttgtgcatgaactgcgctcgatctggattccagtgatcctctgcagtgcccacctgcctccagggagcgactgaagaagccgactgccgggggaacacctggattcatgaaccaaagcagcctcaagtttcatgttgtcaaggcagggtatcagaatctttctgagggcaaagtattattaacaaataaaaatatcagtattttaaaagacaattacaggagtgttagaggtcattctaaatttcatcacttcacgtaatataaaagaaaaaagaaaagaaatataacaaacattttaaaaacataattaagagttcagttaacaaatctgtttcatactttcacaaacagtaaaaatgccacagacaaaaatgacctatttaagttgtgcgagtatatgacacattgcaggcattataattatctttttcaaattccataaatcaaaacagcagcaaggccaaaccacatttttttcctctctgttaagcatattttcttgaaatgaggtaaagcatggtaccaagtgcaatgcttatctgtgctacatgaacagaacagaagggaaaaagctattataaaacgcagcatagttaggactgcggaaagcatattataaaagaaattttaaaaaatttacaaatgaaggttcatgttaactaacttgcacacaatcatcataaggaatttctgcagttgctttttcaagacacgcctccccagtcctttacacacgtgctcagggcacaaccacaccccactggtaggttttccatattacattcggtctcacattgcaatcacaggaacacagggtggcacacagggctctaaagtggggcaacatagagtgattttttttttccttaattgacagatgcaaaacatttcaacaagctaaacacaggaaaactttacagcattaaaaatcagcagcacaaaagcgttcataaccatttcatatgtctaactcgtacttttttattttttaactcagtaaccaggggatcacagaatgcttcaaactgtgagtcaaattaaaatctactatttttctccaacaaaaagtgaaacggctgaagtttgctgttgataaaacatttgaatggtagaaggaaatttgaacccctgagaatgtatgacctaatcatgtctaagtttgaacatcttagtattaacaaaaaaatactcttcttaaggttacaaatatattgaggcatttttctcccactgggaatcataactgtgaaaacaatctgattttggtgccaggaatcaagagaatcccgtaacactgggatcaatgtattagacacaatgcaaagccctaagctcctggcatcaggtagtttataaatattaagagatttgtgattaaacttgatcacaaatcaccctcagaataaaattcacatccagccttgttaactgcacacttttacagttatataattcaagaattgctttgttttaactggtcatatcttacattaaggttttttaaaaaatcaaatagacatctaaggttccaaatcggaattaaatatttttaaaacaagtcacctaatttgctcaaaaactcgtttaataatttagatctcaatttaagtttaagattggagacaacaaaaaacactggagaagcttaatacccccctcactcagggttccttagaaagcagagctgacagttttctgtcggtgcactcgcacagaggcatttctctgtgggtggatgatgcagataaagcaggaaggacagtattcaaatgtcacttacatataaatgcagcattccacgaagcatcaagttcagaatcatgtgctgggaaatatgagacacctctgctcagctttcttaaacttcaagcataattaacggggcaaattgcagcaaacctctactggtatgttgatgggagtgcaagactgacccacagcttttaaaaaggtaaattaagaggtattatagttacagtgcaaaaaaaaaaaaattaaaatttcaagcataatacataaacatagcaccaaacaggggaaaaatgcatgcaaaagaaaagaagaactgaggtatttaagtgaagagtgcctacaagtctaattaaagaaacttaggcaaatgcctaaagaagtttttttttttttccttttccaaagatggaaataatgagctagtttatctaaattaatgacctaaatcacagatgtatcaaaattacggcagtttatcgcaaacgttaaactttcacggcattaacagcacagctttggtaggtgaaatatgcatgcaacattatgaaaagtatagtaagaaatttatgtgaggagactaagggtaaaggtgctgtgttttgcttcttaaataagtaaccaatcaattataaaatctgcagcatattttaggtgtgatatgtctaaggtttattttgttagagcaacagcctagaaggcaaaattatttgccataaacatttccatcagtgggaactacctggcaggaggactttagtaaaatggggtgtttagccaaagatcatttttatgataaaaaatatccgtagactacatattctggtttttaaaatgtcttcagtatacatatgacagaaattttagtatgatcctgtaataagttacaactatactagtgagttgtaagtatcacgctgtctcaacgtctaatgcataataaaatgaaaggaatgtaaaacagtttgttccaaaaagatcagagattaaagactatccatgaaggtttcacttttaaggcaagaacccttttttatgcaagactatgtggcatcagaaaactaaaatgtgattcaccaacatgccagccaatgttcattaaaaatctgtcccttactatcaggtgcaacagcgaccgggaacatcaccttacacagtataacgtggaaagaaaagacaacattggcgcacttctcctctcgaaaaccttatctttctattcagcttatcaactactgcaggactggcactactgcacacacggagagatggagaagaatctacatcatcctagggactgctggaggtttaagctccatggccttctaacactaagcaaagctgacataaactcaaaaaaaaaaaaacaaaacctgtcaattattttgagcacttgctaaatgtcatcattaaagcactcttgtgatttaaacaaagcagaagtgaggaaagaagataagattgtgtttgcgcaaaaaactaaaactacaattagttccaaaattttatacatatgttaaatgttttattctgttatctatcctgttatcaaccaaactttaaattctgccttcaattcattccactcactaacaactttaagtcttcctttccgatttaaataattttccccttaattttttttgttttgtttcttgttttgaattttaaaaagcggtttcagctattgggaacctgaggttgattagctttgaggcttcggagggctcttcttgctgctgcagatttggcaatcctgtaacttcgaccaacacctttaaatttcccctttcctactacttccacagtgactctgaccttcccgtcgtaagttctctcagccgggctgtaaaaaatccaaacagcttgaattagaagtcagaagtatttattatcattgtcaatcagcatttagtgtgcactctcaggccaggagtcccatgtataagctgacaccacacaaaggaaacacgcgttacgacttactgcaattgcatacccccgacagacagggctgccgtctagtctttattacagcattatttcataaaaacagaaggaaaaaagagaagtcaatcagattacaaacagaaatctgacaacagcacaccacagtgtaaatatttttcagaatcattagtttacaatatctttgtgaacttttcccctttgatgtttttaagttaatgttttttccatgtacattttttgcttacctaaatttggcagtttctggttccatttcaagcaattctcgcacaggggaacggggtacatttgcagaaaacttttctgcaatcaaaatgaaagaataatatgaataatatctctgaagttgtttttaattttgtgggtttttttctttctaaagggagccaacaatacctattagtggccgcatcatgggatagtacacctgccagactgtctccagtgacatcccactatccatgtaaatggcaccagcaagcgactcaaaaatatcccccatggcctttggaacttcaatatcctcttctttctcttcatcctcctcagatctcctaagctattacagagggaaaagtgacttgtaagcaaaaaggccacttttacaggcagtccacagatgtagtttcttttcttggatatatgacttttgttacttctttagtaaggggggaaataccatttatggtatgcctactatattgtaatagtaaaacaaatgttatatttttaaaaaagtttttcaaacttctcaagaaaaaaagaaaaaatatccccaccccatttattattctatatacccagcaaagaaaaaagattacttctaactttaaacaaccttaacaaagaattagaaatagtcaataaaagtatgaaaaaaattcaaattcactcgtaatcaaagaactatactttaaaacagttctactccctagctgcttggcaagcattcaatagtactaattggtctggtgctggcacgggtgtatgctgctttggggagcagaaatcgctgttgtagggaaatagggaaattatatttgaaagattttttcctccaagttccctcttcattaagccactagatatgtgttcactataaccgagtatctgacatagcatgtatgcaaattaataaaagaaaatcatgcatcaaaagcctttgaaaagttcacaattctttgatgcagcaattgcatctctaagaacttattttaaggaggtaactagatacataagcgtatttatcacctccatggttattaaacatcctaaccaaaaactacttaattactcggccataaagaagcgtttaaatcaatcagccacgtgttgactagcgtgtggcccctgagcatcacgatacccatcaatacacggaaagtcagccacaatatattatacgtgaaaagaacaggtgacagtatcctatacataacagaattccattttacattttagatatgtttatatctatacacatccacaattcctcccaaaatgttaatattggttatttccgaggtagcataatcaggcaaatttaactaattttcttcttatttacttgtactaacttttctaaaatcaacacaaatcatttgtgaaaaaaataaagagaaagtgggaaaatactaatttctaataggttgtttagccatacaaagttacatataatacatttatactgctgattacttaaaaaaacagacttattgttcatatttatggttttgagatagaaaggaattttaaaacttaccaagtttaattctctctttttacagctgaggaaacggaggcccagagaggtaaagagactttcttaagatcaaatagtaagttagaaatgccagaccatgacatttccaatcagttcttgtaacttctatacatatgtttatataaacaaagggaaggaaaagaatgaacaaaaactaacaaaaccaatatgccccactggcatccaaagagagcttaaatctaattttaactaattcctcaaatttcaagcttagctatttctaaagaatgagactaggtaacacttggaagtctacgagctggtcccgccttctcgcctcacagcctgccacgctccagctcaggctgttcatcttggacaagagcacagaggcgcgttaaagtaagagcagggcctactgactcctccagtgcacatctgggcagctggcagggcgtgaactcggctctgcggctagacttcaaacctactcttaatttttgtcatagaaagtcactactccccaacaaaggtttggtgcaattaaaaaggggaaggtacaaattaaagcaatgacaactaaaacagctactagtattaaggttgtatttcctgactccttataagaaaatctacaaaaataagaaaatcaaaggaaatgaaatgggaagaggaggaaatgagagtctctctgggggacacaggtatgcagatgaatgttaagagactggaaagatctaagcaatatcctttcctacaaaaattcgaaatagctcacaaacacattagaattagctctgtcaccagacagcctttggctgaacttacaatagaagcctcccaaattccaatggtcaaaaatttagaagtttgttttttaaattagattttcccacttcaagtagaagcagaatgtatatttatgatgcttccctgagatattagcaaatatttctgatccatttaaaaaaggaaggataagctacactgggcttttactaaagctaaacctgccttggggtccggcagtggaggccacttctttggcatgcctcaatgctggaagccctcatgaaggcgtgggaagggtacctaactgaaaggcctggttccttctcttcacctgaatgaccacacagcccacagtgggggcagacaagttcaagaggcctacctgcaaactgcagttcactcgtgctcccacagaacacagcacactgggtcccacacccctgacctcctgctgtccctttagaccactatgccgtcagaactctgaaactacagagactcctagttagaccacttttttcaacatcgttttgaacagcactaacctcagaatccattccttgcatttcattcttctcaagctgaaactgcacaaagtcatcaatgacatggaagagctcaggagagacagctttgaagtacttgtggtagtcgtactttacagccagcgatgcaaagatggtgttgttgaccagggcagaccgcaggtctgtcaggacccccggggagtgctgccgcgggtcttcataaaggtgcttggttatgaggtagtccaaaatcgcatctcccaggaattctaagcgctggtaacaatctgaggggatccgaagtggaaccgtaagcttgtgcagaagcatttacactatccccacatagcaactgatccccaaatccgaagaagatttgtatttacaatcattttcatacatatattcttcaaaaaggatatctgacatatcatactaaaaagcctctggaaactaaattttaatgacaaattaagtacatttcttatataaactggggtcataaaatcttcaagtggtcaaaagactaacgcttgttaagaaggaaaaacaaaacctcacaggtgctatcatgatcactgaatgcttttctctggcactgtgctgtctgggcaggtgctggggccttcctctcgagtctccctcacacatcatcacttaagtgaaaccagggccgcacacacctctccatgtggctacactgtgctgccatcgctaaagtctcattcacactctggaatctgtgcataagtgataccattcctcactattcctgggctatttttgttacacaggatgacaggaaaagaagaccctcttcttaacttgagctattatagaaatgaatttaccacaaaccaagagattgagaaagaagagttgtgaaagggagcaaaggcaggtaaactggttgtcaaaatgtgaaaatgatcaatgttaaatcaacacctctattttctcacagtgattaaaataatatatccagctgaggaaactgaggcagggaccgatggtgacttgtcccagaataagcaaggaattaagaagcagggactgctaggcgagaacccaggtctcggaacttccagcagaatgtagtcgaaagccacgtatcatttttcctccataacgaaaattaggctttagtttcatcagtctttccagtccagagtcagatagtttttcactttttggtttttacattttgctgatcaccttaacctacgctgcttttattatataaactacaaactttatactttgctttggtgttctgaattcaggcacttatttttctgatacagaaattgaaatgtaaacttcagctgtgtttcacagcctgaagctgatttgggtgtgaggggcttgttctcccttctaatctaatgggttgacagtctattaaaagaggggcaaatacagagcacagtgagaagtagaagatgacagcagagtcacagcaagggccacgcaaccttcttgtgaaatcattgcttttaatcttttaatctatccatctttaaaaagaccctaaaggaggggtctttttgtccaggaagaacaataaaaggctgtggaaatacatccagaatatacaactaaatcaaaaaccaaaagcagcactgaatgggcaagagaaagatatttgcggaggataaaatggggaaaacacatcaaaatactaaggttaaaatttctctaattaggcagatataaaatgacactgatgagggtatatgatagccatactcccaacaaccaaagttataaagcaatacgtgctccccaaataacaaggaaaagaattctttctattccttttgttccccgccccatcccttgaatattaagcatgaacactgtacatgcatagatcacttttacaaggccaacacgatgagatcaacacaaagtctcattttcccagaaatgaagtctggtcgtgggctccttaccagtgatagtattgtagtggtaggaggcatgtgtaaaagcctggagaaggtaagccttattcttgaatctgtagttgattttcttttcaaaattttcaaaccccgatataaggtgattcagtgttttatctgcatctggatgatcaaacatacatcttggtggaatcttcaaacaaccatattccgagtctttcaatacagaagagcgtgaactggccacagaagcagcagcacagctcactgaaaggttcttttgttggctgttgaaattctcccgagtagggcacagggccttttcccgatcagtccttttaattaccgggagcaccttcagccccagtgaacagaggaaaagctgagcagccctctccccacagctggttaaatagcagcccagcagggcttccacacagtccgctatgcttttgtcagcaatacactgctcagtgtgcaagtcgtaagaaatggactgctttcccgtgtcaacaccacagttttcttctgatggattccagaaccccaccacaaagtcatcttcttcaacagctttgctaggatccagatagcacattgcatcccaagagctgtagtcaaaatcctcaaaatctgatgaaaatggcatactacctaaggaggattttttgggcattttccattcatatgcagaatcagtggttgaaaaaggagaaagagagattttctttacaaaagctcctgaccccattaacatattatctataaatctgatatgttcctgatcatactccaggaaatcatcttcatagtcagcctcttccttcggagccctccacatcaggctctcctcctcctcatcctcctcctcgtaatcctcatccagtttgccattcgccagcatgcagtcttttgtctgaaacgagggggaatggggaaggaggggaaacatagctgctgtttttaaaagggtttgaaactcaataaaagcaagggttatggataatttcaaatgacaaccacaaatactaaaaggcaactttaaaatcatggccatttgttttcaattaacataaaataagttatttaatcatataaacaaagtaaaacatgttctttgaatgttcgttttctaagttataaaatgacctttatccagtatgaagctttaagttaaggactttgaacatggatataaagttaaaattaatgtccacaatgcaaaacttcaactaagtcgtctaactctggtaggacacacaatgaaagcactcatatgctgatcacacagatcttcaattttgctgacaaaatttgaaaatgtggtaatttgattttcaaaaagattttcaaactaataaaacgaaattccagatgtagaaaagcattacctttgcaattaagaatataatataaaaacagataaaatcattttttaaaatgtacaataggattttataataaagctttttgtccctatttccacttcaaagtatacttgccacaaaaaaactacactgctttccttaaaaaataaaagtgatcactgcactaagctatgaatttgagaagttacgttttttccctccactctgaactacggtaatcaggggaacagattatagcataactgacaaaaatggaagaaaatttagactaacatgaaacacaacaatccaatttctgtcaaaagatctttgctaattccaatttctttggcaaaagcttatttgtgagtgacaaccttaataatgggctagatttcagtaatgatgtaacttctttgcaatcctagaaagatgccaaatttctgttatgcaagtttttaaaaaaccaaaaaacttgtgaagggggaagacgaagggtgtgcatcaatgttgattgtaacaactttccagtgttctgacaaaaaaaagttgcaaccttcaagcattttttaaatactacaaatattttaaactagactcaagatataaacactacatttgtctgaaaagaaatagcagtaagccaagccatatctctaactatttatcttttcatttttttaattaagaaagaaacaccttttcaagaataaggaacaccaaaagcaactgtagcggcagacctcaaggaacatttcctgctaacaatcttagactttccaaggcaacatgaagatgtttttgattggtccttaagaaaaagagggccaaactgcgatttttaaaaaatcagacaatattttttttttattgaaaaaaaccttctgtatctttagaaaggtgccaccataagccaaaagtggcagagcacaaaaatcacaaagggctgacttttatcacaaactgtgtgatcctgggcaaagccttttagtgcctctgggtttcagatgcttcatctacaaaagagtggggttctgtctcataaaatgtttttcaagagcacttcaagccttttaagaaaaaacagccacatgaaatccttttctatatcattcaagtcaactttgatactctcgtctattaagaggcgttttagcatgcaaaggtttccacttaagcccatttgctgaagggccagagcaaggtagggagaatggcaatgcaaccagccaaaaccacagtgtatcttttcaatataatgcaagggcctatatttcaataaaagtaacttactaaataaaaatctgaacagtatttctaatgaattccaataaccaaagtgccatcagaaacattaagaaaaataaattgaactttgtgttgtatcttaaaaaaaaaatcaatgacatgccaatgtcaccttcatgctacaagtttttaaaaagagccaaaaacattatgaaacggtattaacaaaggaggatgactgttactggaatgttattcatagaaataccataccatttctaaagttgaaaatctatacattttcctctaaggttctacatatttctaaattaataacaaataattgttcggacctaacttgcattaaaatattcccttaatgcttttccaaataagttctaattctgtaataagacaaatactacatgagttaaaaacatcctcaataaataggtaaaaatccaaatagtgtcactgaacatgctacctggaaatacttaaaggcagatatataggatacatgcatcacaaagaagacatggagaaaatggatatttaaaaatataacctttgaaagaaaaaaacggtattatcattgttggcctgaggtaaaaatgaagtaacaatgagccaatttatttttaatgcaaaataaatctccaagaaatgaaactgtctgaagcattgcctttaacttcggaagaggcactagaactctcccagtcaaccaccactgcgctggttcctgcagtttggaggccctcccaagtgccctctggtggccttcaagacaagacaaaatgaagtggctgttgctgatatttggagtcttcttaagtcactggcaagatttaaattatttccagaaaataacaatctttatggatgattttttttttttaagttcacaggagtcctgactgggaaaaccctgagctacaaaagcaagattttactgaaattaattatttcacagacagactggagatcacaggtcactgaaaagtcatttcactgaacagagctaaggatctaggataaattgtaataacagcaaagtgaaatttttttaaagaagagcaaaactcaaagtcaaaacatcacatactcttatgcctttggaaaagaaataataaaaatagaaatttgcctccatcaaaattataatactatttctgaattcagtgaaaagacagtgtaattaaaggaattaattaaatatatcaaatatctactctattataaacataccaagaaaatgaaacaaaaaattaataaaacaaattatttggctcaccgaaaagtaaatccctccagttacacacacacacacacacacacacacacacacacacacacaaacttaccatttcatctttttcccatttatctgtgttgcttttgtcttgatttactacataaccaggaggaagccaattcacagggggatcaaatattgacaccaccatgcggctgggtagtcccttcttttttccaaggcgatacagattacagttgctgacctttagcagaaaatattaggatacttatccataaatgatcactgctggaattcattcaaggcatattaacatatcctcagttaaatgttcttaaaattaatcaattaattatatgtcatcaattaattataagggctctacagtttttctacccattcatgttataaaaagaatattaaattcccacatattctatgcttttttggtgtaaatatttctgaatataagatgcagagcagaaaaaataatgtatataactatgcatactccttatgaatgactgagaagaaacacttcagacaatatcaaagccttgaaaatacaacctgatgatataaaatgcaaactgctaactggaattaccaaagtagaaaagaacccatagaaaaagtcaagatgtcacaatattttcaatgaaatggggggaggatgccatcagctctagctgcaaagtgaaaactggcaccgaacaaaactgaaacaatgttatattcctagaatcgaagccacaaacgggatttcaactgtaatgctctctcaaatattattcctttgttttacagccatttcaagacacttttattcaacttaaaaaaaatgaaccaaaaggtttctgtttattcacattaatggaacagctttactatcttaccctctactccggtctgtttttcctaatgcctctatctccttcttaatttctcacatcattgcatttctgtcaagttagtacttggaaactagggtctagaattgtcaatcccattttcattttcataaagctcggttccttattattaagtacttcattagccctcttcccatgtaactcaactattgtttaatagacaccccccatatgagaggcactcgattgggcaaccctgagggaacgatggcagcaggacagaggggcagtcctcgtgacacacaggctagcagggaaaaggagggtacgtgtgaccactatagccaaaagtactctccctctctgcctgaaacgtagcaggctgaaataaatgctagcttccctttccaagctaagagaacaaagcatcacaagcgccaagaagaggataaagtacaacgtggactcatgggagggaaatcacattccaagttgacagaaatggtgggcaggatgaagaaagagctacgtaaggtctcaaatatggggcaaaattctggacaggtagagatggaggcaagccctctgcagaaggaaggacagagcaagggccccaaggctgggggtctgagcgtggagtctgtccaatgagctgcaaggggcttccacctgcttaggatccaaaacgcatcagggctgaaagggcctgaacagcaggctgagggagtgatcattctttctgcagaaataaggagtagaaggtttctgagcagacaaatggacgagttttgtaatagaaagtcacctctgtcttgtctaacagagtatcctatcctattgcctatgccacacttgtccaagcctctgatactttcttcctgcaaccacctcttggaaatctcatccattctcagagcttccgtatggcgactactctacaaaaccgtatctgaatcctacagcctcaattatctgaacatttccacttcatattccatgaggtctaaaatctcaactctaacatggacttcccacatttctccctacctccctgctactgccactgcccccaagttgccagtttacgtggttgttatgactgcgcctccagtccacctcaagatcatcctgggaggccttggacacactcctgactctcccagatgaacagttaggtgacctgacaggagcccattcgactctctaagtgtgagtcccctcatctgcaaaacagggatgtgttgtctctttcccagaggcttagagaagagtgaatgagtgagcacttgggaaatgcttggtgtgctgcctggtgtgatggttctatccggagcagttagtgtgatggggaaggggaaggtctccaaagccaggctgtctggattcgacccaagctctgccacttacttgccaagtgaccttgggcaagctaacttctccagcctattctcacctataaaatggggaaaataaaagtttctacctctcagaattataaaaattaaattaggtttatatgcatatatgtgtatatatgtgggtgtgtgtacgtgtgtgtgcgtatacggttatcttttagagtagtgcagagtaagcacttttaaattgttagctaaaattatttcttctgaaattctcactcacctcagccccttcctctctaccagaactctagttctatcccattctctgcttctgctgttggtttggatatgcttttcaactcacactacattctgctaccagattaatcattttaaactaccactttattaacattaatagttccttgctctaaattccttcaacagtgcctacaacattcaaaacacgtgcaaactccttagcccagcattcaaggccttccacgatacagcttcaccccagctgccttttcaagccttttctcaggtatttccacacttctgactgctgccacggctgcttccctgacgctgacatgctctgccatctgttcactttgcttatgcactgtcaacttgcctcctccattaatgccatccttgattcaacagtgatgctccttccttctgagtgctgcaagtgatcagcagctttctaaggtatttgtccaggaggctcatgttgccttgtgagacttttttccatttttcccccataacttgaatatcttaccttcattccttttcttaagtcttagtccatgctgagtttaagagcccgccctttctctgagctatcgagcgttaattactcagaactctggtgtcaccctcttcacactggagagcagccaagctctgtgaagcttgttactcttctccgctccactctccaaaactttggagatgagctcctccacaagacttgtgtcttactcatgtctgtatgccttgtaagccaagacgtaccctctcaaataaatgtttaactcaacaaagcagaagctccttgactgactacaatgcacatttcttcatatccccctcaggatcaaggggtgtacacacttgcatagcttcctttgaactgactttcaatcaaaaagtaaggcacgtggagatcagctaagccccaaaacctgagtgtgggattggtgtaaagcaatactcatcaactgccaggtagttctgccacaggctttcgctggccctggtagaacaagggagcagctgtgcttggccggtgtagcaatttctgagcatgatacgttctcatcctctgagattatccaacactgcaaaccactttcaggcacactgaataattaactgctcaaaataaaaaaatcatctcttacctttttgcttctcatatatgaaaggcggccctcatgcgcatcagggtaagtgcaaaatagatatgtggtgatggcatgctttaaaaaggagtcgccaagcatttcaagccgctccaggttaaatccatcactagcgtttgacagagtcaaagcctgaagaataagtccaggattggggccaagagtccttgaggagtacccaatagaagggctctgctcagaatccatcctgcccttgagcacttgaatagtgtctgtcgtaccaggcattacggccatcacaggacttccatctgaggtagatttgttagcatttccatcaaggtatttattactcaggagagtacattcatcgctgggctggggctggttctcgtaactgtataaattctgaatggaatatgaggtagttggttgcacgggtatttcctgcttgtagtaatttagctgatttccttggcaaaagtctctgttagctaaatcataactgccattggcgagattttgattgtaagaaagaccattaattgctgtaagatctgctgaaacttcaacgtggagcttaccaggggactcgctgagcaacgttctgcagttcacagacatttggtcatgattttctagagaggaggttctattagcaccttgatgtgcagcattttcagggacaattgtgctgtgcttacagtaattatcattttcagctgaagaggagttagaaattgagatgaaagatttgctgtcaatagattttttccacccgaagtctaagttagggtatctgcaaagacatttttataactttacatcagattcttcaaaacagctaggctgagagcaacagcaatttgaatttaaaaacaaaaacaaagatcccaaaaatgtactcctaaactttagaatagaagcaagtttccaaatttttaatttacagtgtaaattataaagtgggacatggttttatctactgctttaatccctggccctagactctaggtgtggtagttaagaaggtcacgaagcttgcaggcatcctgcaggacctggggcctagcttcacgggttggaatcccaggcactctggttaacccgctgagtaactctgggcaacttacataaactctctgtgcctcagcttctgcacctgagaaaagggctaacaattcctatctcatagcactgtcttaatgattaaatgagctaactaacacagggtacagcatttaagctagtgtttggcactatagcaactaaccaataaatattgtggttattcctattatattttaaaattccttcaatccctagaacagtcttgatattgccaattggataaccagaactaatgtgagtgtttaagccaacagtttctttagaatgcagagattttactaatgggaagaaaataatgaagacaaagaacatgctaaggctattgctttttaacatatatttggatttttaaaagaaaaaacagactgaaaatgctgatgcagtaacaaagaacaatttcattctcactccaactgttatggcttaagcagtaatggttatttctgacctcagattctcatctccctctgagacttgacaagacataagatatccattattttctttttactcttttaagaattattttatatacaattttaacttaattctgttcttttgcaaacaggatctcatgatctgtgttctttctggctgactgcacaggcatacctaaaatccgcaggaagtgatctgactcccacgccagcatcgctggcagtctgggctcttagctcctctgcagtcaaaaggcagtgaaggcgataaagtatgctggggagacaaacagcttttctccacagtgatgctggaattggatgtatagcacagagttctggaaccagtatcttcaagtaaggggaaaaatggacagataaatacaaagcgcacacacaaaagaaaaaaaaaaagaccaatttcactaatggataaagaaaatcataaatgctagtaaaacttaattttaaaaaatatttgtaaaaataatcctctaaggccaaatgggatttatcaaaggatttatgagaatgattttgtgatatattaatgggccaagtataaaaacaaaactctcaatacttaccaaaaagaacattcaaataacattcaacacataatactaattaaaacaaaacaaaacaaaatttgaggattaggtaacttctaaaaaattaacgaatcatgcatttaacttggtaagataaaattcaaacttatctttaataatctttaatactcaaacaaatactaagttatgctagtacaattaactcattacctgtttattctgcagactttcccatttggctttcctcttctcagcactgcttaaaggaagcgctttccccttctgattcaaatgtcgaggtgtcaaaagattaagtctgtaagaattccaaaacaattttatcaaacacacaaaaatgagtacatattcacagtggttctccaaaaaccacctgaagagctcatttcaactacagcctcttgggctaccccttgggcaagtttgtgtgcaaagcatctcctgatttcagatagtccacgggtgggcagggggacagtgaacctctgcatgtctagtgatgtctggtaagaatccctcaagtgcaatccaagtgtcatctctgaagccccttaccttgaagatgtgtggtccacatccagcagtggctggttgagattggttaggtcaaggttgtactttgttttataatattctgcaaaagtttcatactcaggggaaggaaatttactgagtggggtaagatcagtgtacacatcagctacataaaatcgatgaggctgatcaaaattgcgatatctaaaaaagaaaaacaaaaaaacaatcagttgctttttgatttaaatcaactattctcaaaatacaactgtttgtagtatggaaatgatgattaagaattcaaaagattaaaaataagtaacaataaacatctgtattccaaatatatttcaagtatgtaagaactgtatttttatcaagtaaaaatggacacattattgtcccattttattattattcttgttctaaatatctacattttgataacacatgaagctaaatggcacctttacatatctatttcatctatataaatagtataaaaaatttacactatccaaagagtaaatactttgtatattactaatgctaaacattaaagacacttgtcatataaaacgtattactgcatcatctatgatagtgatggtcctgataactaacatttaaaatatggttttgaggtgcaaaaagaaaaaaaaaatcaaagattgaattacaactagtattataattatttgaaaactgcctgtattgtattgccccaaaactccattccctaaatttttataaaataaggaaaaaaatcattctggatttactattttcacagagcttaatattccttataaaaattttaagaaatgaaatcattatttataatcaaattctataagactctggagactaaaaggatggagattttaagaagaaagcctatcaacattagattatctgaccctttacaaaggaaaattccttatctataacgttttaggtattattttttaagcaagtatactggagagaacgggtcgaccttaagagtttctttcttttccccgatctgttgcccaggctggagtgtagtggtgtgatcacagcttactgcacagcctagaaatcctgggctgaagcaatcttcccacctcagccctgagtagctgtgattacagcacgcatcaccatgcctgactgactaatatatttcctattagtaattacaatgctaaaatcacagcccacttatattcccatgtgaataagtgaattttttttttttttttgagacagagtcttggtgtgtctccaggctggagtgcagtggagcgatctcagctcactgcaatctccgcctcctagcttgaagtgattgccctgcctcagcctcccgagtaactgggactacaggcgtgcaccaccacgcctggctaattttttgtatttttagtagagacgaggtttcaccatgctggccaggatggtctcaatctcctgacctcatgatctgcccgccttggcctcccaaagtgctgggactgcaggcgtgagccaccgtgcccgacctagtgcatcttttaaaacaaagtatcaccaccattttcctttccatttaaatacctaccttggaatgataacggcatcttggtaatcttctaatttaaaaacaaagggtgtttcttttgtatactttgtactgggaatgcctatgcgagcttcagacttctcaatatcttccatgaatttaaagtcaatatccaaagtgctggagtcattaacttagaagagaaaaacgactctttagcttgttaaaacatgatacagataagtttcataccaaagctgtatgtttgtatatgtgtctagagttatcaaagtaagagatttttttcttaccaacattaagaggtagaacacagtatgctgaatcagcgtctgtaggtttaaattctagtgcaggtttttcaagccgaagaatatgtgagaatatatactggtgaagtcttgtaatcaactcaagcatttgtagagacaacatgaaaccagacttcttcaactcaatggatatggtaacctctccagagcgtgtgtacacaggaaagtgtggaatcttagcaaaaggaaatgtaaagcacccctcaaaattaacaggtattttattccattacagttaacttcagaacagaaatgatgctttctagtggagaaatagaagaggcacctcgatctttaaatattaaacatactgaggtaacaaaaggtacttactactagtttttttttttttccttttcctaagcaagacgtttttgacataagtactcattatgaaatacctacctgaggtatgggtttggccgtcagtattccaaagcatcttgtggtatcttcaggaggatagagcttccgccttctaaagttgagttcatcaggtaaaggtgtagttaaaaccattcctatcacatacaggtaacagggctgatcaggtctgggataactatccctcaaacactctggaatctagagttggaaaggaaaattaagcgtcatgctcaagcatattagcctcttttccagatgtcagcaagaaaacaaattaattctggctttactaaaagctgatgagaataagctaagaaaatacccgaggcatgacacttcttaattacttaaccctgctgggtaagtcagcggatctcaggacagggctgctgacggtggcccaagttcacatacattataatgcagtgctgactacatagctaataccaaaattatacataaaacaatccaacactgtagggcctttttaaaaatactattcatttgatctatttcttctgacaagaaaactcatctcttccttgggctttttatgtattaactgtagagtatcagaaaatgaagttaggcaaatttttaaaaaatcacatataatcctatcactcaaagacagcctttattaacattttgatacactgtataattcctagactctttttctatgcataaatacatagaaacatatatacatttatatttttcaatacaaataaaatcacacaacactggtgtatattagggtatgtgtgtatctgtgtttgtgagatagcctgatttttatcccgttactgtaaagagaatatctgtccgagtcaatatgagccaatatcatcatttgtaatggctacctcattatgtgagtgaaccataattaaatggacattgctgctaggctttcaatattaacacaatccttcagattatggtcttgcagttcctgaggttcaatgaaaaagaactgcatctgtagttaaaaggtacaaaaatgctggtaaaagagacagttatatttaatagagaatcagaaaataaagaatgtatctattaattaaacaggatgccaggcagtactatgcttttctttttttgtagagacaaggtctcactatgttgaccaggctggtctcggattcctggcctcaagtgatcctcctgcctcagcctcctaaaatgctgggatcacaggtgtgaaccaccacacccagccaatactatgcttttagaaacacttatcattaacgactttatcacatgaaactagtctcacgtgaaaatttggtatgaggaaaacatgcattttgggaaaatgggtaacattcatgattttttaaaaacatgattctgaatcttgaaaatgctaagctgggtgcaaaattttataaagtaaaaacttggtaaaactgcataagcaaaaccaaagaaacacatatttaggctaacatacaggcacagcagtccccgcttatctgcagcctccatggtttcagtaacctgaggtcagtcacggtccaataacaggtgtgtacagtacagtattttgagagagaccacattcacataacttttattacagtatatggttacaattgttctattttgttattactgtgcctaatttatatcttaaactatcataaatatgtacaaacgtattttaaaaagcataatatatgctgtaagtcctcacttaatgtcttcggcaggttcttagaaactggctaagggaaacaaccaattggtagaaagaaaccaattttcccacaggctaattgacataaatcagttaaattcctccagcacatttctgatcacaaaaacatcaccaaatttctaaattaaaaaaaaacacttttaatattaagcattaaaataaatgtgagctatagatacacttaagaaagatgaataaaaacaaggaagatgattattcacccacttattccagttcagggccaagggtgccagagtctatcctggcagctcagggccccatgcaggaacccatcccggacaggacaccactctgtggcagggcacacgcacatgcatccccatgctcactcacagtggggcagtgcagacacgccagttcacctgatgtgcacagttttgggatgtagtaggaaaccggagtaagcagacatgaggagaatgtgccaaccccacatagagacagtggccctggctgggaacgattttttttttccttgtcaacgttctaatgaaacaacgttgagctgctggaggatcggtactatctgcagtttccactgtgggtcttggaacataccctccaagggtaagcgggactactacacacagcaaaattctgcttttgcttggggttcttatgaggtaaaaatattaacaaatattttaaaaataaatacttcagccaagtttgtctattactagaagttagatttagagatgctttcatgtgtgaactctgctaggatgcccacagattgagctggaaacactccatggaaataacttatttcgattcccaatggcccacactgggaatctgacataactcctgacagatatttgtgcttctaccttccagtgtacctgtcatcttgagagggcatcttttcacttgcttattttatcacacaaatcctcttctgtcttagccccaaatcataagtaaaacaagaatcacaccactaaactgaatgaaacaaagaatgtctatttaaatgaaataatctcattctggatagaatatgacagatgggtccaagaatccttttgagaagaaaaacaaaagcaacctctgaagtggaagagcacacattctacattaggaaggaaagaggctgatctgagagaagctgtgaatcggagaaaggagctgagatccagagtgggccaaactgtaagggtgtgggaagccagccaagcagaggaactgagatttgatgtagcggaaaacaaagtcagaaatgctaggtttttactctgttctaaccaatactaactgcttttgggtagcactgccttcgtttcgtggaacctggtcttcctggaacactggtctcttcttcatcatgcaaatcaagctcctcttcatatttaacagtctctttcccaactggcatcaaatggtcatccagttcgcctaacaaatttaaagagagaattaacacaatccagattttgcctgattaattagtaaagaatttagaacagaactatgttagaaggacctggaaaagtaatggaaactaaagcacctttgccttttacaatttaaaagtaatcagattcacacttcaggcaaagtctattttggcatccatatattccaatatgagctggactgcaaattctgttctaaggttcagaaacaaaaacatctaaacatgacatcaccacatatcaatgctaaataaaatggccatagaaaatgggtccacttatacaggagcaggattgagaaaaaaaaaaaaaagaaactgagttcattttttaaaaaaggattaatttctatactagtatagactaatttgagagactgacatattaaaacacaagtgttcatggtgcatgattcaacaattacgaaaagacctttatgtacttaaaaggagtcattaaagagagcaaataaatgacagttgtttgcagtcaagctatggaaaacaaagagctcccacaacaatgtaggatcttcaagttactaacacttatgtttatattcaccaaagcacattaagatcagcaagtgaatagctctacaaaatccttacagatctataaagtcctctatatgctttttttttacaatggttgcaatttattttcattcgtatatgcttttcaaacatccttaccaattttgtgcagtttctcacagcaaatgagagctacaactctttcagccaatcgtacacagctcattggtggaccctgaaaataacaaaaacctttccattatatatgcacatcgctgtattacctctagcacatgaaacacctatgaaaccactgccccaacatttttaaagttcaatttaccaaaacaaaattctttattttgaaaaattccagcaagtttttaaaaattctaatctccatatttgaaatattcatctttaaaagtcctgcctagtaaaaactaagtcataattaagattttacaattttgatgaatttaaatttcagtaagattttaaagtatcttatttttactaatcaataaatatgtaacaaaaagaaagatttatcaaaacatagctataacattaacagtattgagcagctttttatgtgcaatagaaattagtcaccttggaacacttggaaatcagtactgagaccaagaacagtatttacaaaaagcagatttttgagtcaccaacaaaataactaggacaacgcaacgatctataataagttttatattactctaagtgtctaagccacagttgaatgattctgtcaaaaatgtgcatgttagtaacaccttagaagaaacttcagagatcacctagtccagttctaagtatctgtaaattagacagtctattacaaatatgaacatgtagatgactacaaaagcaatctataaatctacttttgaaagtaaatttggtttttatttttatttttggtctgtcaacacaaggctcctgctcatgaaagtagattttaaaatcaaatttacctataacttgcaagtcttagaaaagctgaaaaaatccactaatgacacattttaaaagataacaatcatttcttcttctaaacttacaacaatggaggctcgaagaggtgagttaattggcagataaagagttgaataaaatgtaccatcaggcaactctcgggttctgcatttaggagctagatgagtaaacggatcacttggtaatctagcacagtatctgtgaagaaaaagaaattctgaggctgaatctacaactgagaaaatattgatatttataacctcgagtttgatttgtcatgtgcctcttcccctctactgaatttgtatttatatgtggcatttaaactttactgcttcaaacttcgaataagacagaatagtgttgtctaacagaacttctgcaaagatgttctatatcttcgatgcccaacagggcagtggctggtgagcacttgaaatgtgagaagtacaactacgaaactccattttttattttattttaaattgaattttgaatttaaatagtaacatgtgtcgagtgttaccataatagagcacaaagtattgttcagaatccagtaagaaaacatactgccaatgttttttccttaatcatcttacatttcccaccaactaccagcacacatataaggaaggcatcagcagagggcgggacagcccagtgctgacacaaaaaggacagtagaactagcaactcactgagcaacagcaccagggaaggttggaacagggcagaaagctagcccagaaagggatgctgggacaggacccacatcaggagggtgctggaatgggcagcagccctgtgaggttgcgacctgtgcagcaagggcacctgaccacagttgcagccctacagagcagggagactggctacatacaggaagactgaacactaattattttgaggacaatgggagccaaatttctgattattagagaaaggaggtacaaagacagaaaggaggaaatctagaatgaaacctctagtgtcacactgaaaatagagatatcaacagatagacactgaaacaaatacagatgtaaacatgaacaaacaaacattctagctctgtccactaaaacgcctggcagcagcaacacaccggtagcaatgaataaacctagtatccagttcttggtttctaactacaactttttctccactaaattcgaggaaattgccaacatcaaggctggggcagtctagaatgtcttgcgccataaaacaaggaagtattcaaggaataatagtgagatgttaaaaagacaaagaaaccagctttaaggggttcccactggccaaatatgaaacaattttaacatcaaaacaaacagtaaatgataatgatagattataacccattaaataaaacaggagtccataagttcacactgacattaaaaaatgataatataagaatgaataaacggagagaagaaatggatggtagaatgccaactaataaatacagaaataatggagttagaaaatcatttagtagccatcatagtaataatcaatttgggccagaaatatcaaagaatgcttacactaatgagtcaaactgggaaaaggaacaaattttataccgtctcaaagtatctccccatgaaatatctactaattataaaaggggtgaaagggaactttacagtagagaaaactggcagacttcactcaagtgatctaagttaccaccggtaagggcacaaatcaacatggtgtgcgacttggtaagctaggatgaggagaggacaccatcgtctcagtgatgtgctgcccaaaaatttgtaacctgggtctcatcataagaaaatagcagacaaacccagactgacagtaagactacaaaatgacagcctatctatcttccaaagtttcaaggtcattaaagtcaaggagagactaaagaatggttccagattgaaggagactaggaagatgtgacaacaggagttgaggacaactcctgactctaaggtagatactttggctacaaagaacattctcatgaaactgaatgagtctctcttggtgtctgggtgaaaggcatatgcggaattctagtattcttacaacactttaaagtttgaaattgtttcaaaataaaaggttacaaagaaaatcttatacttgctcttttgtctctgaatagaaattatcctggtatataatccaggaatgcatttgctgttcttagctcttagaaattttattatcagctctggacaaagtaaattacaatgtacccaaaaacataaattagtttatcacaatcttactttattgctaggggaaaattcaacattacccaatggttatggcacaaaacaaaaaatttcaggatttagaaaaaaattggtgagaattataaaattaaattaaacctaatttaaaatgccttcattatgttagccttgccaaggaatactgaacttttattgctgcacgatactgtttttgccttttgatttaaaaaaaaatgaaaaaagaagtaacttttctttatcgaaaatatggcaagtctaagtaaagactggtaaccgcaaaatgtcaacaatacaaaatgtacaggtttagacttaaactgtgcaacattcccaggttttccacacaaatgatatgatgccatacctattgatgtgtccaatggccgtgttgattgtgactcgtggaccaccatcgtcaggcctcaacacatatggtgggaaaacgtcatcatcatccatgacaggatcaatgtcagtctcaccagtatcaaccgacttggaacacttgtttctcaagatctgaacatttaaaaaacagaacttatgatgaaaacacatcctctctgctgtatgctgtctgcctctgtacctacagaaaaaactctcctgaaaatatctctctctctcctaaacatacttcagtactccaaagtaacctgctgcagacaccttcttccaatgaatccctcccagttccaatcgtatggagacccttaccatatggtacaaagtctatactgtaccgtgcctacacagacacacacacacacacacacacacacacacacgactgttagtctttctgaatgtaactaccatgtcatcattttccaatcactcaataacttaagcagtcaacagttactgtccatatttgcaatgcaatttcccagacgttcatcccaaataacatatgtgatgatcattttcactgttatcttattgtgccctttcaaacactttgtataacactgccgggtctttgtgatcattctcaacttccttacaatgtacacagagtacacctcttttgagattattgcctgtagataaaactcattatctgttcctatggatacaaagaataacaaagaagccacattaattttttttcccaatctgccggcacatgttaatatgttgatcttaccttttcaatagctttgtaggttttaaggtcttcttcaaaactttttattttgtctgtatccgctaacattatataattagagatgggtgcccttgctcttcctttagattgaacataggatcgatattctgtgggcaaatcaaaacgaaccaccaagttgcattttggtatatcaacaccctcttctacaatacttgttgcaataagcaggttggtctcatgtgctcgaaatttcctaagtacctgaaaaaaaaaatccaccaagaaaagcacttctaagaaaatttctaaaatgaacaaaaaaaattagtaaaagtaaatgacaactgtcatttctgacacacatgctcttgggcattctaaatccttaaggccaggctaaagaagatgacagtatcacagaaaactcagcatgcatggaaacatggacaaagaaactgatttaatgagactctccaattcaggataaattaaatggtaacataagctagtgttcagacagttatatctatcagactggctcctggactctccaaatttggaaattatcaaaaagctacaatgtagaaaaggccttcaacaggaattattctgctaattttaagttaaataataaactttaaataggtttttgtgtacaagccagaccatggtattagtttttagcatctttacaatgctgtttcctgtattaagaccttacaaggcacaaaaatatttaagctaaaatctataaaatatagtgctgtttttttttttaagaattgaaacaaaataggcctttaaatgaaaaaaagaaaacactttctaggaaaagatttcagtttgttaattcatagtcatatggaatgtacaagagttaaggtcatacatgctttgtctttccatgaaatgcagttgtgtaacatcaatccaatcacagaaaataagttggttgatggcaattaagacacaaaattggtttgccagatagctattctaattctgagcatacaaatcactctacagctacctcatggggacagctggtctaatatatgaagaagtattctataatacaaaaaataatagtaattctgggaaactatgaaaaaagggagaccctatgggcactttgtctgtatatgtcccgaaaactgttattgtacacttattttgatttaagttacctcttcctgttttctgaattctgcttccatctgtttgttgcgaggctgattcttcccaatgccatgtccagttatgaaattgctactgatataagccagctctggatcttgtttgccagcttcctttatcaatctaagaaaattatacacatttggaagttaaacgttgctgaaagaaaataaacttttgtttttaaagcctcctttaaaatggaagtacatgcattttttgcaaacatacctaacaaaacggtcttggtccttttttcccaacttgcttaaacagaaatcactgtcactcttcaccacatagatctgtggaccaagtacttataacgccaaatacaagattggtttgtactgacaaatgaaatggtcacgttacctccaacagctgatttggcgacggtgatttaatagaaatgtggcccaggatgagactgagctagtcagagagaaacacggatcctcatagatcttggcctcgggacaggacgtccaatgaaaaaagctcgactcatccctctaccagttctactagctcatctctcaactcaacacccttctctagaccatgcacagcttgagctgcaggccctactgtgcttatacagaaaggaccagtgagcccaacaccaaaggaaaccttcacccccaacaaatgtaacaagagttccagctgcgatttcttttcctcttatcctatcacctgatatcattagaagcagagcccatgggaaagaaatgttgtatcctctcaatccctgatgctttcttgtccccaggccactgaccaaaattctgcacagcatagtacagggcacagaaatggcaaggcaaccccacccttccctgtcatgaaagaggagattcctgagctctgtctctcttcctgcctgctcctctgtattaacccacagtgcctgtaactgaaagctggccttctagctaagaaatggcaaagagctacgggacgggatcacattacacgggtgcagaaggttaacagttagtgctgccattacagctattttggaaatatccacattcaaaaactcagcacacgggataaatggttccacacctgatataagcgattccacatggtttctctgaagtcatattacatagtataaattccaaatagaaaattgcatttttaagttgaatcattcttttaaaaaaaaaaaaaatacatgaaacagactaataataaagagctggaagtggccatctagaatctctcttgatcccaaccggcacaacacttgcgtgtctaggttagtttgggagtctacaaactacagcttgtagttcaagctctacagttcacgtacttaaatattcagaatcagagctcccttattatgttccaagatgtgtttaattattttaataaatttaagatgtaacagaaagcagtgttacatgcaaacaaataacatgtccaaaagtctaaaatacaaaataaatcaccttagaaataatacatacttccaaattttatataaataagcatcaatttgaatataatagagatttagaatgtgttttaacttactgttaattaggcaaagaatgtattttactttgctaaaattataaattatccatctggcagacttcaattagctaagaaatagaggcaacaacagtcaattcatttttccttaatgaaacccacatcaaaaccacagagaacagaagagacaacaggcacaataaataaaatctcttgtaagcaataattacatgggatatacctatgctaataatgcttagagagaaaaatgtatttatctacttggtgaatcttggccatgcctaaccagtacccaggacaaagctacaggcttcagggaaaacaaagccaggcagtcacatcatgtgaactcccagaggataatggacagtgcaaactgcttaaagagtttgtaacaccacagaaaaaataagacaatgtattatttgtttcttttggtttttacactcagtttatacaagctgttcaccagcaagctgttcaccagcaaagtatactgttccctaatgcacagtgtttctgaaacgatctgcagtgaagaaccagcttttctttttaaatttccaatccatcagaggcagttttgtagaatttcataaaagtgaatgactaagaaaatgaaatttaaaaagtattaaaattcaagcatcaattttattgtattcagcagatataaaattactgtcaaactgctctaagagtttctaaatgcttcttctcaatctttgtacttaactcatgacataggtaaattctggcaccaattcatagcctatactttgtgtgtatatgtacatctaattctccccaattagaatgaaaataacataaccaaaaataggaaatatgtatggtaggttcagaaaactaatagatgtattacaaaaaattgtgatctgaataaacatgctaactaatgcagacaaccataagaggaaaagaaattcaaagatataaacacattatttgaaattcctgccaggttattgaaatacattatcaacaactcctttaacagtatcccttactccttacattttcttgtcaatgtggagaaaaccagatataattcctctatgatttcactaaaaaaagatcactgacagttacataatagcatacggatgttgcactccctagatgggtgcataagcggctgaagaattagcatctactgtgtgctggttgataaaactgccatttttaatacaaagtctcttaccaacaagccagtaagagagggaggtattatttccattttacgaatgaacatactgaaacttttaaaagttaaataactttcacaaaatatacatccacaaagtgggcagaaaagaaaccaagtctcctcggcaaaatggctgattctagggccaggcagggagaaatacaagagcccagagcaccctgtggtatcacaaagaaagtgctcaaaaacaaaaggatgagggtatgtcaaagggacacgggtgctaaactcgaagagctcccagtggccaccgctgcaacaatttgagcaacaaataaataacacagtattggattatggcccaaagtataaaataaacatgaaaccaccaactgaaatacatgattcaattaataaatataagtagacagttacataaaaaggataaaccagacaagttttccttacagaagaattccaaatacatatagatatatccctctccagcaagtggagattaatccctccctaccagggtgggctagacttggagacttccttccaaatagagtaagaaaagggaaacagtgtaactttacagtagagaaagcagacaaacactatcacaatccattgatgaagatgaacatgacgagtgacgttttgtggttgataccatgagagccccctgatataatgtgactagaagagcaggtcacctccatggtattcttccatatccgatcaccccagtacaaccccaagaacataagaaaaacccaaatggaggggcattcaccaaatacctgacctgtactcctgaagactgtcaaggtcatcaaaaacaagacggaaactgaaaaactgtgacagaccagaggaaactgggtagatactgacaactaaatgtgatatgacaccttggattaaagacattatcccttactgtctagtggttagaaaaaaataaaaataaattttttgaaaaagaggacattagtagaaaagctgtcaaaatccaaataaagtctggagttaatagtaatgggccaatgttagttttcttagttgtgacaaacactgacatgagataatatcaatgggggaaactaagtgaggggcatatgagaactccgtaccatttttccaacttttctgtaaatctcaaattattccaaaataaaaagttattaggaaaaaaagggggaggggtagagacaggatgtgaacccaggtttgtccaatgccagtatcacacaatactagtatattacacggtgaaaagaacactggacttgagactggaagccattttctgccacttgatatgtgtgtaatttgggggaaggtcacacactgatgcttgttttcttcctctgtaatatggaaagaacatctactttcctcccctatggagtgttgtgaatatgtcttaaatatatataacttagaaacccctatgtaaatataaggtacaaagaaacccataaacataagactgtgcacatacctacactacatatagaagtggctgtgatttattttttttaattaggagagtagaaaactgcatgtatattacaatagcttatatgcccatgaaactattcactatagaagggtttttcctcccattaaactgatggaaggaaagaatctgaatttcaggaagtttttctaagcttattaaaaagcttactggaacaagacctctattgtatatttaattagctgctcataaagtcaaccctcagagcactcttgattcatcatacagcactaaattccagtcacattttatgaaagttgatcacaattcatctgatccttaaagtcaataggaagtaaccgactgattctggataaaccttttcaggctaatattcctgcaataaaaactggcacatctttacctaaaaatacatgcagaaaacaggaggaaggcggaaaatacacccccatttcttctctccaagccccagaaaatttatttaatccttatataatcctaaatggagacggggagtatgtccataactaggcttacaactgcgccagcattaaacttttttgactcccaaaatgctttttccctgccctaagaaataatccctccttagtcacgctctcccaggtccgtctcctggcaatcttcctgctgtaaagcactggtttttagtgttctgtgatgcccaggggcattactatgatagaaagaactggaaactaggagtcaggatattaggattctagaattgtctctgccattgactagcaatttaacttacagcaaatcactctctctcctgaggctctttctcatttttacaaaaataagtgggttggattagatagtcagtgaggtccccttccaatcttcaacttctaatttaaatgtaatttggtccctaaagttattttcctttgtattcatcagaaggatcaggctcaatgactatgaaaattaccagactaaaaactgccagatgatgaccctcgagtccaatttctcgttactcaaaaaagtttttaaaacccctaaacattcagaagcagttaagcgcgtgtgcgcgtgcgtgtacgcgcgcgcgcgcgcacacacacacaaagaaagaaaaagaaaaaaaaaaatcccaaattaccttaggaagcaaagcttagtttttcctaagagatcactacttgcagaaaagttagggatcaactgtggccaattaatggatctcatagaaaagtaaattgatttaagtacaaaataaggaccttttttggcagaaaaaaataagagtatctatctacaaaccaaaaggaccatacattaagtgaccatctgacagaaatctgaagtatagctccctggctggttctaaattagaaaaaaaatctttcattgaagggagaaagagtaggaatccacggcctaaaatttggattcaatatcacctttgctaatagtcttagaactttccccaacattcttattctcttctgattcacaaaattttaatatgcagtctatgaaccaacccaaaataaattcaattgttctaaactttttgcactgtggccttgaaaactttatttttggagacaaagtctggctctactgcccaggctggagtgcagtggtgccatctcagctcactgcaacctctgcctcccaggctcaactcatcttcccaccacagcctcccaagtagctgggactacaggcatacaccaccaccggctaatttttgtattttttctagagacagggtttcgttgtgttgccccttgtgaactcaaacaatctacctgcctctggctcccaaagtgctggaattacaggcacaacccatcatgcccaacctagccttgaaaagttgaatccatatttttaagagaaaaaaatcaacattaaaaaattagtcacaatacccagataaaatttctcctaagactacctgaggggaacacttggtgtgaaatgcttaacacaatgtctaacacatagttaaggattaataaatatctgaattgaatctaaaattgaatataaaacaatgctttacttaaatgtatactgatttttttaaaaaccatacttgtcctccattttaggtagattagaatagattagcatcctttaagaaaaaaatatcagccatatgaaaagcagccttctggaaaacatcctctctgtcaatcccaggacagcatgacgtatcagcaatgatggcgccaagtcaaggacacttacataaccctcatgctagctcttacagctgctgcagcgcatcacatcacaacacaggacgcctccctgttctcatgtgaaaggagtcaacttacagatttacctgtttaagacaactgctgtgtatcttctttccacaaaaataattccgcacaaaatgttggtaaaaggagaaggaaaatttgtctctggcttctctttttcttcaatttcttcatcctcatcatcatcctcagaatcactccatgacacataattatcctgatttctattattataccactcaacgctttcaaactgctgtcgctcatatggtttatatttgcgtaagatttcgagcagtttgattactttaggagttacaaatttcaggtcaagtgaggcaggtgagaagtgctcttcacatagtgcatgtattttccttaggaaagtgtctgtaaacaataaaaatttcctgtgcagctcctcttgctcatgtttgatgtatttctgtagttctcttaccatcattccagctactttatctgcacaccagggtcccagaactaccaatacggcacgacagtctgatagtatctacaaaaaaaagaaaagaaaaaacctaatgccaaataataataatgtagcattttcatgtggggtttaactgggatttcagttgttctcaaatggctccttaaatgtaacccagccttaggttaagtccctgaaggtggggggagaggccattagccttttcaagctcatttcgtatgtatatgcctagaaccatctccttttttcaataaaataatcaaacagaaattaaaagatgcaattgtatgaggttaatgaagcttatttttagatctgtaattagttaaaactatacctgagtcatttacttcctgccaaattacataaaatttatgtagcacagtaatttaactttaggcatcaaggaagagcaatacagttttccttgaactttatgtacaatattctccagcattatatgttttccactatactgactagaaactgtggatgaattttggtcgatctacagtcagcacctctggatgccacggtgagactgttgtaaaaacactgcacagctgtctctatcatcatttcttttttctttctttctttctaaacagtaggaaaggcctttattggttggaagtggaaaaggagctaggacagctgcactggggcagcctccacacactctgtcacagttctccaaaagcccctgttatccgatttcaatgaaaacaccaccacaaggtcagggctcctcaacattaacatctcagctaaattcagactctgatcctggaccctcccagagtgctgcatcttacaactctaattgagagccgaaagtcaatccatggccagggtgtaactgaggaattgagggagagggagagaggcagagaggcagagagggagagagggagagggagaaggtcgggggagggagaggggaaaggtgggggaaggggaggaggaggggagaggaagagagggagaaggggagaggaggagggggaggagggggaggaggagaggaggcagagatggggggaggagggaggggacagggagggggaggagggaggggagagggaggaggaggggaggaagagggggaggggaggaagacagggaggggaggagggggaggggagggggagggaggggaggtacagaaagaggagaggagagaaagagagagagagaggaaaaaaagacaggaaagaaaagaaagaaaaggaaagaggaaaggaaagggaagggaaaaggaaaggaagaaagaatgcaaagattgagaaaaatgtgggcactgctgctcgagaagaaaaaaatcatcaggagagaaactaagacccacatttaatacagtgttaacattcacaaatggttgcaaagttctagggcagtggttctcgagctttaatgaatcagattactggagggcttatcgaaattcaaaactgaagactgcaaacagtaaaattcagtcctgaggaccccacccagatgctgctgatgatgatgtggggcccacaatggaaggatcactgtcctaagggatctcttctcaaagcagtaccactgagagacaataggctcatatccagttacacacactaggaaactgcggaagaatttgtttaattcaagggtttgaacaggaactaactcttctgaccaaaaagaaacaaaaattggactcactccttatacttaaataaccatgacatgaatcctagctcagctccttaaataggggaagtctacacttaatataaatgtgcactggataacaatgaactcaacctaatatggtatgttcaatgaaaaatgtctaaaaagattaagaccttaaactaaaatgcaaagaaaagagccgcattaagcatattttcatttcaatattaaaaattaacaaagctttcaaaatataatcactatacctacttggtatatgcttacctgtttcgaaattaaagtagaatctctttcttttgaatgtacagatatattacaatcattgataaaattaagtgcttcttctaattccatcagcagtctttcataaagcccacttctgtcagtaaatggtccacaatccaccacaatctcacatggctgagaagtatacctttaacataagaaacaaaaggtatcaatactgcagtagtgagaatgcaatttaaaaaaagtttttcaaaaagcaaaaaaaaaaaaaagggaatagatactaaaaaaaaaaaaaaatgccagaatgttagcagtggggtgagattttaggtgtttaattattatttttctatattaccatatttctcaacagtaaataatgtattttataaaccagtaaagtgttgtttaaaagatgttttcaaaaggcaaggggagaagaggggaaagaaaagaatacaaatgagcatccactgcatccccaagcatgatgctgggaatttacataccttctaactgaatccacacacagggaggatgacgaaggaaatgaaggttcaaagacattacatgactctgtctaaacaaaactcaggactgccttcctctgagggctctttcagccaaaccctactgcctccctgaacaccttttgtttcatttctaaaaaactcactacagcattatgatccatttataggtctaactccaaaaagaagcttcctagtttcagtttgtatatctaatcaatataaaaggcaggcttacaacatgccttcctaaagtggtactcatgtttatctgcacaggttgagtgcccttatctgaaaggcttgggacctgaactgttttggatttccaatatttttcagattttggaatatttgcatataaaaaatgaagtatcttgaggatgggacccaagtctaaacatgaaattcatttatgtttcatatacaccttacagcttgaaggtaattttacacaatatttttaaataatgttgtgaatgaaacaggttttggtcgcattttggcttcagttcatcacaaggtcagatatgaaatgttccacttgtggcagcacaccagcactcaaaaggtttcagattttggagcattttgaatttcgcgttttcagattagggttgctcaatctgtactacgcttgcctgttaggtctcaagaaatgaccacaggggctgatattcaaataattttgccaatagatttcattattattagtttgttttcttttgttttttaggtttagacttccatcttttgcccccttaggcatttgtcagaatgaggaacaagggtgttcaaaatactcatgaaactcaatcacttcgcagaagcggaaagaagaatgggaagactgatcactgggagttttatcattcaatttatccatttccatatctgtgtgaatttttaatatttgcaaatatcacttttatttttaatgtatttttaaatcctcataaggaaaactcccccaactttcattcatttctaatatcattccttgggtcttttatgcctttcataaaaaatgaccaccagaatggcacataatatcctaaaagtacatatgataattttaataaaagaaatctagcaaaaacatatatactatagttctttttttcttaacccaaaacagaatttatactcaaccaaagagtccttatttgcagaattaggtaatgcttattcaacagattgcttatcagttttacttaaacgctctactacttctacttctcagaaaacctttgggcaatacaagtgaagcactctaactcaggtcagacaaaagcacaagcacggccttctacttcaccaccacagtgttggctcaagaagtcagacacagcacgttctagaggtcgtaagatttatatttcacatggcatttggatacctaagtttgatagatcccaaatattacctttccttctcactctccaaagaaaattttcctcaaattcttactaaatgccaggcacactgcagatttttctatgtgtcaatgtaattgatcatcaaagaatcccatgaaaccactgtcaatgccattttacaagttcaaggaaataagtgactcactcaaggtcacacagcttacaattagtggagctagtattcaaacccatgtctgacttaactccacaacttgagaaatcagtctccgctacttattgtaactgtcctaagaaccaccactaggtaatctttagccttatttaagactacatctagtaagaatggaaggctattttgacataaatcgaattcattgcatttgaaaagccattttcctaatttgtaaaggctcccttccaccaacctaagttatgaaggttttgtgtgtgtgtgcgcttttcaatgaaactcaaaatagtaaccctctcaaaaagagtcaaacctagaaatcacaaacagcaactttctctgaaatccacaacccattttcaaaacaaaggggtatttccaaacattttaaagtatactgctgaattctctaaataacttaatgttctttgaaagcatcatgtaagacattcaggtcagaacaacaaagcacacatattgacagaaaaaaaatacaaatttactgtcaaagttcccagtccttggcaacaacagcaaataggaagagctgacacataatctcttaaggcagaaatgcctgtctgctactctctgtggaaacaacgttagattcttgaactcacaggtaatggtacttatagagaattcttactcttgcccattcctttttactgccatttgttcacttaaataggtactctctgcaaggtactacaaaaacaccaaagacttaatattgttttcaactaatctcattaaagctgagtcaatcagaagtgcatacctgtctaagaccaccaggtcagttgcagtttcagcattactcttaagaattttctctagtttctgaatcttttcttccaattcctctggatcacatttcccatttaaaatggaagcagttagtcccaaaatgcgaggacatgatggacaattttcacagagctaacataataaaagatactgacagtaaagacttcattttgcaaggctataacaagagagacatcgccatattaaaacatatcaaaatcactaacaaatagtaaaaaagaatttgtttggtggaaatgccactataccaaggacaacataaaattactcatagaattactgtagtttgtttaaaagatctgtttttcaaaaaggctcaattagatacactatgaaaattatatagaatttattatgatgtttaaaagtttattatagatttaaatgaacattaatttaatattcattcattcatacactgcagccaaactcccaatattgataactaatattattgcttttgaaatctaaaaacaaaaatctgcatttactcaatagtttaccaagaattactaagacttaggtctaaaacttaccttcataatttctcgataggggtggtctaggattgcaagatgacactcatcaaacaccaaaaggttaatgtctgacagtgataagtaaccatttttcaaaacattcaaggcgacatagcaagtcataatgagaacctaaaataaaatcaacatcagtaaacaaacatagcattcactgcctggatatacttacataaaatcagatcatagagccattgtatcataagtgaggattaaggaattcattagtcaaaattaaaactaaaatactaaatacatataattttatacatcagaactaagaaggaaatcaggaaagcatgggaaaagagtagagaaaaaatatcttgataatggaaagcatgtcttgacgacaaatctaaatttacttcaggttcttagatccccacagccatattatgactgatgagatctgtcaatttaggcaaatcacaaaacaattcacactttttatttttttctgttgaactgacatggttttctggaagaaaactcagactaaatgttatttttgtagcctatcattatgtggatatttaagtgctttattaatgaggacttatcccagtatgtgaagcacactagtaggctgggctgtttcagttcagtgaggaagcgcctcttaatcactgtgtatcccccaatgaccaacacaccaaaagccccagtacatgctggctacatggaaacatgtaagttagaggagcctccagcacatgctggctgcatggaaacattcagttagaggaagtctccgtcaaagacctaaacagctcaagcaagaaatttttccagtttcaagacatttaactcaagactaaattttttgaaagcgcattatcagcaagttggaaataggtcataggaatttgtgtttttcaagcaagcagatcatactgaaacctatttcttttctacaaagttaagagcaataaaaattagtaatttatttgttttttgggtttttttctgagatggagtctcgctgtcacccgggctggagtgcagtggcgcgatctcagctcactgcaaactccaccttctggattcaagcaattctcctgtctcagcctcccgagtacctaggactactacgccaccacgcccggctaatttttttattgttagtagagacagggtttcaccatattggtcaggctggtcttgaactcctgacctcaggtgatccacccacctcagcctcccaaagtgctgggattacagacgtcagccactgcatccggcctttatttggttttaaggtaagacttacagtaagatatagtacatcaggactagcttctaggctgattaagtataggaaattagttttcaaacctaaatcagacaaccaaggctacagatcatcttacaaaccaagtcaagaacttgtagggatttataaagtgaaatttctctacaagtcttacctggtgcttagtaaactcttggttccatctctcttttgtccaagatgcatttacttctaggtttgagtattccccaaccttgagatctgaatgagttctgacagctgacacttgttgagcaacctggtttgctaattacaaatataatactccatgtaaatatgagaaatcttgcctagttggctctctggactactaatgattaacagtctacagaaatccttattattatattagacctaaccaacaatgtttttgatagcctctttaaaaccacagttccaaggttatcctccaaaaaaatggcacctactagacttgccacctcactttttgtcactcgcttcagagaaccctacaccacctttcttcttcatagctgatttcctctaagccaccctcctgttttcttcaataaaatcagatggaaacaagacagtctaacatgtatttaaagcagatagttatactgagacaacctaaaaaaagagcagtgacatgaatatattagtgccctaccagcttaggttcacattttatattttttatttttatatataatccaagcatataaaaatcagtattttaaactcttaactgaatatctaatttctaagcagcatgtaactttattaatacaactgattagcaaaatcataagtacaaacgttaattatccataattaagcaccttttgacatacttggtgaagctaaaacatcaagaaaaaaataaatgtaacaacttagattatgttctaatgtacatatgttccaatacttatgttccaaaagcaatccattcaaaagaaatacagaagcagaacatttaagagaaacagcaaaaagaaataggacaaaacaatttctgccagaagagattaaatgagtacattatctgtcaaactttcttcaataatttaacttaagaaacacagaaaatctgtttaaacataaaatcccatccaatttcccctgcacaacttgataaaataattttttattaccagagttgaccaagaacaccgtcctttttccatttctgctgaagtctcccctgatctgataggacagctctttagtgagtagtactgcaataaatgtcttccctgagccagtgtttaaacagacgatggtattatgatccagagctgcttcaagcagttcaacctagaaacatggtgaaaaaaaagttatgcacttcttacctaagtacaaaatttataaaattggattttattttaaatcaggaaatttcactattctctaaaatcgtcctccaataaatttacaaaaaaaaccccacagtctacgtctttatacgagaataactcagaggaataaaatgcctgctatatacagctgtattgtgtaaatacgtgttgaaatggcatttaccctttctttaagcattatttttgtatacacagaatacttctttagaataacatgaatgactaaacttagagtaatcgtggttctgccagttcatggctgaacattttcaaactaatctaggttcctacccagctcactaggacagacacatccaagtgaatattaaggaacagtgaggttttcagagggggaaaaaagaaacttcacaaatacaactatcaaatccaattacccagcagatgttagaaaagaaaaggactattaagaataaaagtattttaaatgagaaaattaatcagaagtgggaggcctgaaagggtaaatgagttttatataagttgtgtcaactatatgctaatgtattccattttagtgtagaatgctccagtattagtgttcgcattagtacctgatattttcttggcgtataaatgttatcatgaattgcttcttgttgccatggcagtccaaagaaaggacccattggtgaggaagcaggggtcatgagctgcaggcctgccatgctgaggggttgcaaagcagggcttttcattcatccagtgtttctttcattgcatttttgttctagcacagcttactacaaaagggaaaaagaataccattacacaatcatgcagggttaaaaacaaagaaagcacagaaacaagagaaacatcagaatatcattcctatgagccattcaaactcttcctataattgttttagctttttcttgatctaagaggatcattttaggagtcaagcattctgtaccttacccagtgattctatgcctagaaatttgtcttaaagaatgaatcaagcaacttcacaaagagatgtacatgaatatttgttgttgcattattacttaaaaataagaaataactttaaaatctactggtaaaaaataagctacataaattatgctatgactatataatggaatactttgaatccattaagattatagcacatatctgtagttcctgacacagaacaatgtccataataaacctttaaaagaaaatatgtacagcatgatgccttgttaaatatatgtacatatataaaatatgtaaatatacacataaataaattttgaacattctttgtatattctatgacgttactgataaaatgataatgtatggaaggcacttagcactgtgcctgcaccacgaaagatttagacacctgctaaaattgtcactttatcaacagctcacgaacacaggcctttttctcaattgacaacctattataaatgcacaactatttaaatatgtatctttaaaattatacatatcctagataaattaaaacaaatgacaccactctgtgaaataaaaattttttcatggtatctaagcactttctatatttcatatagtttttcccacagataaatttgattatgtaaaatgataaaaactgaaactttaaaattcctacccttcaaacagagggtcagggattcaaatatctgtgtgaaagcctaccactggctttactgtcagcaggatttcctcgccccacagaagggaatttcctctcttgcactgctttggagtgttcattgctattactctatgaaactggaagagataattcaactctgttacttaacaaccaaaacttttgaatctcctgacatgttaagtacaacacatgacttaagttgttgcaactatttcaacaagaagtctcaagtgtagggtctcttatacaacacaatactgaattctgatttgagaaattaattctgttgacaagaattcaacattcagctaccataaagtactatctcaagtaagcagtgcaggggcaccccactgccggagctgagagcccggtaagacagcacgtctgcgggcctgacagcacaatcacgctcatcatctttccagaagggaacaagcgaagtaccacagagtactttatgagataatattaacccataatttccctggatcaaagagaactatgttcttcacgaaaaataatgtgctaattctctctgaatcaaagccccaacagccattccttttaccctagtacccaagcctagtacccactttcccaaattcagcaagccctcaggacttgcaggctcatcagttaaacttttttcttaatacaactgccaagaaccctatgtggaagtctattttaccaaaatgtctgagatcaggaggccactctgaaggcccaaggctaagatctgcgggtcccatcactgaccttctcacctggaatccactctcgtgatacctccacaattctccttcatgactacagactgcatactgtctagcactattcacccttaagcctgacccttcactttcacccaacccaaatgctaatcctagacttattgaagacatggtagaaggtaccaagaaacaagtctaagttctgatgatggatgaaaatataaaacaaaggagaaaagagggccgtgatgtaaatacccaacacatcttctcctacttccagaaaccaggtatgtccaggaaccagcagcaccccctcctccctacaactgtcaccatttcttctcatatagataacattagtaataacaataaataactttagaaaaatagtctaaaaataaattaggaatgttttattttttaaagctggggagggtattcttcaaaaatgtcaatgccataaaatacaaagaaaaactatgaaaatgttccagattaacaaagactatatggatacaaatggacataaagatggaaataacagacaggcttattatccttagtattacgtcctccaggttcatctgcgtttttgcaaatggcaggatttccttctttttagcgctgaataatattcctccatgtgtgtttgtgtatcacaatttctttacccattcatctgttgatggacacttagattgtttcaatattttggctattatgaataatgttgcaaagaacataaatagtgatctcattcataaaggacattattgaattcatttttaaaacgagataacagcaatgttaaaattccctgaagttgatataactgactgtggctatgtaagacaatactcttattgttagaaaatatacactgaagtatttaggggtaaagagctatgatacatgtaacttattctcaaatggtacagaaaaagaatctacatgtagatacacacacacacacacacacacacacacacacacacacagctgataaagcaagtggggcaaaatgggtacagcacatatttttgtcctattattcttgcaacataaatctttttcttcattttctgctcaaatataaataaatacctcattcctttatgtattcaaaagcacaaggacaggtgattctggctagctctcaaatactccatttcctccacaggtaatagccatgctcaactcagcgtggtctcagtcaaacagtggctcactgatcaaggatccagtttctttttttcttttttttcaccaagactgagaatcactcgatcactcaggctgagtgcagtggtgcaatgatggctcactgcagcctcaacctcacaagtagctgggaccacaggtgtgcatcaccacgactggctaattttttaattttttgtagagacagggtctcactatgctgcctaggctctagtttcttattttctgccatctgccagtcacccaaacctaagctgatgggcatacaacttacccctggccagaggaattggttcatgctcatccaacagcaaaaaatttaggactttcatttgatggttgaagagaagcagttgtctttctttccctctaaagatgactcatgaaattattagtcccatttgctgctgcaattacactacacagacccatgaaaagatccagccttaggatgaaaccagcaccgcagatggcaaaaataaagaacctgggtcattgatgacatcaataaactgctggatcaaccaaactcaaagcccagcctaacaatggactttccaattaactgagccaacaaattccttaactatccaagctagcttgagttgaatattctgggataaaagcaaaccaaatgacactctctaaatcactattatcacttcctgtaaaaggtataagtagaaaagaggaaagcaaagaacagatatgaacagaaaggaaaggaaaaaaaggaaagaagggaaagaaggaaaggaggaaaaagggaaagcaagggaaaggggaaaaggaaagaaaagggaaaggaagaggaaggggaaggaaaaggggaaggagaaggaaaaggggaaggggaaaggaaaaagggaaggggaaaggaaaggggaagaggaagagaaaggggaaataaaaaggaaaatggaaaggggaaggggaagggaaaggcaaaagaaaaaggaaaagggaaaggggaagaggaaagggaaaggggaaggggaagggaaagaggaaggaaaagggaagggggaaggggaaggaaaaggtaaaggggaaagggaaagaaaaaggggaagggaataagaggaaggaaaaggggaagaggaaagggaaagaaaaaggggacaggaatggggatagggaaggggaagggaaaggggaaggggaaggaaaagggaaaggggaaagggaaagaaaaaggggaagggaatggagaaggggaagggaaaggggaaggggaaaggaaaaaagtcagggatcaaagcagaaagccatcaggccacaaatattgagataatgaacaagtactgcagccagaccccaagcaaggtgaaaagctttgtttgtaagggaaaagtcaagggtcttagactccaaaaaaccagggatgagctctaccaagaagcttctaagactttgaaaatgttctccttatttgtccttaggaatactttttttcactttctgctatcagtaaattctttttgaaactgcaaagccgcttgtttcggaaacaaattgaggaaaaatctggacagttcttcctcggcacaagagagggagagagatcgtttccctggcctgcctatttcctcctttgttctcataaaatcacaaaggagaaaacaggcagggcagggaagctggcccaagaccaacaaagactcaattctatctggaaaataagccctagacctccaatgtttctcaggcccggtttcacctcaagacaccaacctcactcaagtatgtggatcctattcctacaaaccagcaggtaaagagcttggaaaaggaggagttgcaaattcactcagtgtccaggttctgttcctggcatttcaaaggacagagattttttttttttcttagcaaacacaacatttctcataaatgccctaccccaccctaaaactttcacagggtttagaaaaaaatgataggtagctggtttctaagaatcaatctgagaaaaaaagtggaaaaaaaaaacagagaaatgaaaggttacatttatcaacatttaggctctaaataaagagaaaatagatacattatatagtaaaaataaatatcaaacaataaagaaatacagaaataacatctctaaccaaaaatacctgaaaagattaaggtttctatcagctctcacaaaaaaccatgtgtaagaaaataatacaaactactggaatggaattcattaaaaagttgatatttaaaaaggaaattaagcaaagcactacactctgtgatatctagtcccaaatgtactctgaaaagtactgcccccactcatgactgcctgacttctgccgacctgtaaccttacgttcagattattcacccagcttctcagtaaactatcgcaagaacaaaaaaccaaacaccgcatattctcactcataggtgggaattgaacaatgagatcacatggacacaggaaggggaatatcacactctggggactgtggtggggtcgggggaggggggagggatagcattgggagatatacctaatgctagatgacacattagtgggtgcagcgcaccagcatggcacatgtatacatatgtaactaacctgcacaatgtgcacatgtaccctaaaacttagagtataataaaaaaaataaaaataaataaaaaaataaaaaaaaaaaaaaaagaatgctatcctattgctgcctcatcaccattcaccagcaatttccacaacagaagagtaatccctgttggctgaaagcctatagcatattatgcatcctccctgactgaccaactgaaagtgtttaatcctgtatttcaatcctatgtgctcaatccaagtgatcctagcagttatactacagaggcttggggtatagtcttaatccataaaatgtacttctgtaattttatatgaattcttatttagaaaatttctcttaaaactctgttctcactaaaatatgaccaattagactagaatttccttggatataggagctgcatatcttacccttacctgtattacccactgtacagaaccacatccaggacatggtaaacaaaaactgcaggttgttagaatgaaaacaatgtccacctgagtgacattaaaacctcaaacagcttctatttgcctttcataatttctatcacagatttttagagctattcatagacacacatacacaacatacatgttattcttttactggagcacagctccataagaacaagacatgagtctcattctttgcacctcttaaatttcctgctacaatgttctgtatatacatttaagtaaatatttgacaaactgaattagagactcatgaatgtccacacaataatatacagaacagaatcatggatggatcaagatatatttctattcggtttggaaacacacatctatcccactcctaccagccctgagagatgagtgcaggagagaggatgtacaaggacataaagaacaacaatttaacccttccaattatattttccataaggttacaatgtttaaattaattttcattcatttagtggacaataactggccccagtaatgcactttctatttagggaaaacaaatccaagacttaaaattccaacaggtaatctgtaatataaaaacaggaaaacctataattttgccaatttttactttcttggcatgtttaaacagattttttaaacttggccttaatgaaaagatctgaatctctgctggcaggtaaaggttctagtttcacagataaactggctaccattaactgcttttgcagagccaaaataactccacatgactgtttttcaactatagattttaaatttctggtcaaacaacttaccctcatgaaactagtgaggttgtttcatagtttccacatattatgcacttagaaatacagtcatgcacccaataacaatgttttagagactgaccccgtataagactatggtctcgtaagattatgatactgtatttttactgtaccttttctatgcttaggtatatttagatatacaaataccactgtgtcacaacggcctacagtattcaatatagtaacatggtgtacaggttagtagcctaggaacaaaaggtcataccatatagcctaggtgtataataggctataccatgtaggtttatgttaattaagtacactctatgatgttcacacaatgacaaaatcgcctaacaatgcatttctcagaagatatccagtcattaagcaatgcatgactgtaatttagcaaaagacaagaaagacaagaataaactctcttcctctttccacatgatgaatcacagatttaccgttttaatgtttgagatctctgtgttgctcttgtctgaactgcattttgacattgtgatagcagtttattggaaaatcacagcatgcccaagcttctgctctaaaaataaatgcaaaaatagccaagtttaagattcctgtaaactgaacagaaacacatctacaagagagccctactgatatgaagagttgaataaaaggccattattttgaattaaattttaaacaaaaggcatttagattattttaggataccaaggcttaccctaaaacaaagaacaagagaataagctacaatagcatgcctaattcccagagatctgggagaaataaagagctagagcaaagttcaaaaaaagatttcaaagctaatataaggaaatcaaagtaaataaagtctaaagatggtattttatagaaaaatgaaaaaaatagctattatttcctaaattcacataaacgaaagaaataaagaaggtcaccagaagacgtacttggctgagaaatccaaataacccagtagtaactctttaacacaggtatgaaatccatcagcaattccaatttcccaaaatgaaattaaaaacacaaaaggacagttacatctacactatacatttttatagaattagtttataaataaaataattcaagaacactgttaatgttaatgtcgggcataaatttaaatttggggtggctctctaaaagagattataaatcaaaaactaagaaagcataaaatgtagatataaaaagtttaatttgatcaacaaatactgattttgttagatctgacatcagacttggtttgcgctcaggtctgagccttctgcaatgcctccactaccataagctcaggaaaaacaaattggcagtggcctctttttactacttccagtcctttaaaagacattctcatggaggttaaagttctcatttcatacacaaatttgttttgctaagaagtcaacaaagcagactggggcaaccttatcactactttggcatatacatatttacctcaaaatgctgattctaagttctttcagagtttccaagtctgtattaattcataccctaggtaacctaaaagcaatcagagagaaattttagaagagacaactcattttttaaaacgaactttaagagatgttctactttttaagatccctcataaaattctttatctgttgggcaacaagacaatgcatgtctaaaagaactgccctttaaaattgggatattatgttctaatacagccaggaaaaacaacttgttagtacaatccaattagatagaagggataactcttggcattaaattaccttttccctcagtaaaacttggctttaaaaatacttaaacactatgataaatcagtaccatgctgtatatgagcatatcttcctatctcccaatatgtcagtgcttatgttttcatttttctttttgttttttattttttttttctattttgtagagctggggccaccccatgtttcccaggctggtctcgaactcctgggctcaagtgatcctcccaccgtggcctcccaaagtgctgtagtcccaaaagattacccaaataccactgcattacaactgcctacagtactcagtacagtaacatgctgtattgaatactgcagattacaggtgtgagccactgcaaccagccaaatttgtgttttctaaggctacctcagacttcatttaatttttaatttcattctataccgccacctagtaggatgcaaagaccacgcacaccaacatgtcctgctgtgtcaccctctagagatgatttccaattcagactcacctcattcctagaaatgccataatcaaattactaagttgataatcctttaaaattcaatgtcacccaactattacaaaattattgctaagttatccacattatttccattgataattccatacatacattagaaaggtaatatgtcaagtataatagcaacttattttatactggtaattcaaagctaataggtcattttctcattttaattgatcactgtgaagtaaagtacaaacctgcaaaatcctgtttcataggcccctttaagataactctgaaacaggcacgccacatatcagacagtcaagttttagtacaaactagcaaacttaatccacattagcaactaaatgcagtaacgaggctgtatcctttcacaggctagtagcaagaaagagctaaccattcagatctgaagcctaaaggcacctagaactttctgctgtgaattttcaaaattggtgacaaaataatttcaactcatccatgttattatgcatcacagattctgacattattaactttgcaaatattaccatccagatttcattcctactctcacaaagcccaaaatgcatgacttctataaagttccaggataaacaaatggaaaaaaaccacaatatagtgacattaaaacagtataagcaatactcatggtaagctaacagagaaaactaaaaaaatgtatgaagcactttaagttcctagtaacaaaagtgctatgtgagatacaaggcattattttaactgcaatcacgcctacatcacttaggacagccatggtatagatacaaaatactgactgttgacgtaaggacaaatacaaattaaaaataagaggcatagttctccctgctgaaaataaaagggaagaggtccctttccccttttcttttccagattttatttctccctccctttcaatgtatataaatttaagtctctagtcttataacttggctatgtttcctaaggacctgaaagccatctctgaaatgggaaataacactcaatcgcctggtttcctaggaggagatgggcctaatctgtcacctgactccaaaatgtaaaacctacctctagtcataaaaatgtgaaaaaaaattagcaattttatcttgaaaatatggatgtaatggattgtaaccatttagttacataaaacagtaagatttctttctgtctttgccatccctttagtgactgcctgtgatgggcacagcagtctgatttaatgttcattcaataataacattgttttctttcttttctacctttgtggagcaattttctgggttgggagattttggttttaattgtatttccctaacattagcttttttattttttaaatatagcccaaatctcaaacagtattcataccaaataataaaattccatttcttagaacttaaatactggagaagccctaaaatatgctggccaactacatggaggaatttttaaaaatgaaaatgaaagtgggcaaacagccacactgaaaatgaatccacacatagaatccaagttgtttgaaaacaactcctacctacttcccttttctaagttgtagagcagaaaaagtctcagatgtttttagctaacttaataagcaaattgatgctcttgcctcttaatatacacatttatatttatacatatacttatatatacatataaacatgtatttaatggacgtatttgcctcaaaacactgattctgagttttcagtgacatctatacactgtcactcccttctcatgtatacccgcctatgcaggaggcactgagtaaggcaactggggatataggaagcagcctcttttttttttcctttgtacctatctttcttttaaaaattatcttaatgccagcaagcagttcagtgtcagaataccaaggtttaaatccagactccactacctcgctaacattgtttacttgcctgtaaaacagaaacacctgactattacgaggattacacaagatcttaaacttagtagagagaaaataaaatgcttggaacatacaaaatccatatcatacaaaatatctctacctagaaccattttttttagcataattcttaaactcttaaaattttatgaaacccttaaagaaaacctaaaatgtttcattaaccgtaagattcggcatagaaaatgcattctcatataatgcatagaagattttatacagaatttatagccagattaacctgaaaaaccacaaactcctgaatggggatcaggagatgccacccccaactatgccactttggtatattattttgagctgaaagcaattaagaatcaacagattcaggaaaagttctatgccttccctttttctacttaagagtaaggcataaactcccccttcttctacaccaggaagaaaagaacaatccttatcacagcacagagagatggcaccaagatgaatctgcataaacaaaccttaataaataaaccttttctaccaatggtttcctccatacaccgtctaatcaccttcccacagtttatcaaccctagaaatccaaacatcccctcctttgtccttccacaatttatcactctttgttaagatggtatatgagcctctaaatctaagtgtttctttgggattttacatctttttctttgatgcccctgtgcgtgcaaaaatattaacatcaatacaagctgtagacctcttcccctgttaatgtcttttgttagtttaattcacagatcccagcaatagagcctaagtgggtggaggaaaagttttcctcccctacattccaaacaagctagccattatgcatttacattaagatgaaaatcaatgcaattaaatcacaaaatatggtacctaacgtaaagtaaatttaaacagttttgtattcactagttctcttgaaaaacaaacaaaaaatactgtgtactacttactggctggacagacatcactgaaaacattatttcactgaactgtttcttaggcaataaaatgtttcacagagaaacaagaaatagtaataatcatggatatttcaaaaatataaaaaagaaatcaaaagaaaatatccaacatatccacagtatataaaacaagtatttcaaggatttatcaactattatttagtgaatatagactatgaaaagattaaggtcaaaccaaggattaagagactaaagagaaaaaaaaaacaataatttcaagaatttaaacactggtatctttgcatatttaaatacaaaacacaagaactatttatatttttacttttaattgtcatttgtctttttaaaaagttttttttttagtttaccctaacactatgggtatgaactttacatttctgtcattcttaattaaaattcgctgcacattaacctagtcattaccacacacacaaaaaaaacttcatatagaaacgctcccttcatcattaccatttataagagcaaagaaacactccccgccaccaatttacatgtctaacaatgattgaggaaatggtttggtaaaccctggttcattttacatggtgaagttcaattcagccatttaaaatggtaagtttataatgaacaaaaatgcttatgttgagagcagcagcaggcagacaaatgcctaggcagacaggggtaggtccccagtgaaaccccaccttcaaatcaaagacagtttaaagcctgaaggtcgagatacacagtattttttgtttgtttttcaagagaactacaagtcccagataaatccagggaccggattgagaacctgtcttgccatttggcacactttcctctgattgatcctcacccttcacctatcttacatatacctacacttccctaattggtttcttacactgtcaagcccacctttgagtggtgcttttaacttttttttgcatactcacaaaccaatcagcacacactcccctattctgagcctgtaaaagcccaggacccagccacactgggggaaaaaccacacaacttcgggtggggaaccacccccgcatcccctttctgctgagaactgtttcattgctcaataaaatttacgtctgccttcctcacccttcagttgtcagcatatcctcattcttcttggatgcagaacaagaactcaggaaccgccaaacgtgggtatgagccgtaacacaggtaggctggggcatgactggcccagccactagctgagccagagcacaagccaggtgtggcacaggcaggccaagtgggagggtagcatagccaagcaaggcccggacacgggggtcaccagccaaaggtccccagctggtaaagtgactgagaaaaatcctgtgtaaatggctttaaatgaaaaagtagaacacttttatttacagtgagactataattatgtcttagttaaaaactaaaggaaaggaaaaagggagggagtgaggaaggctaagaaggaaaaggaagtgagaaaggataagaaggaaaaggaagagaggaaggaggtgagagaaaattagtttacccaaaaattaatgatgaattacttggatgagtatttttcctttaaacttttcagcattttaaatttcctacaacttgaacacacagaattgggaattggaaaacaaactttcaaactgtggatgatttgtgtgacgataagctagagacatacaattctgttttaggtattgaaaacatcctcccagccgtgtgcagtggttcacacccataatcccagcaatttgggaggccaaggtgggcagatcacgtgagcccaggaattctgagaccaacctgggaaacatggcaaaaccccatctctactaaaaatataaaaattagccaggtgtggtggcatgtgcctgtagtcccaactcctcaggaggctgaggcggaagaatcacctgagcctggggggctgcagtgagccatgatcacaccactgcactccagagtaagaccctgtctctagaatgaatgaattaatgagtaaaaacctcccccgttaaggcacaaaatgtggtaacatttacctgaatatctgagtgggaaaaaacacacacaaactgtttttcctttgttctcacacaccacataaaatttctgtgaccaaatgtgtggggtttctccccaacaacaagcaagccatcaattctgcagcggacaccagctgggtgtcttctattaatgactgaattccaacattatctacctggagatagcatcagatcccacaggttgagggctccagtcctcaagacctcccccacccttccgtgtcaattgcaaacctcaggttattttttgcccgtgctcccgaccaatcagttaactggggttcccacaacgccctcctgggatttaacttgctagaccagctcacagtccttggggaaaaacttacttatgtttaccagtttattataaaggatattacaggctgggtgcagtggcacacgcctgtaatcctagcactttggaaggccaagatgggaggatcgcttgaggccagcagttcgagaccggcctggtcaacacagcgagagtccatctcaataaaaataagtaaattaattaggtaaaggatattacaaagatccagatgaagacatgcacagggttaggtatggagaaggggtatagagcttccaagccctcccagagcaaactgccctccaggaacctccatgtgttcaactatccagaagctttccaaactctgtccttcagggtttttatgaagactcattacctgggcatgattaaccttcagcccctcttccctccccagaggttggagggtgggtctgagtccaaacctctaatcatgccttagtcttcccagtaaccagcccccattttgaagctaccaggagctaccggccaccagtcgatcattagcatacaaaaacacatcactttggagattctaaggatttcaagccttgtatgcctaagaatagggtagaggacagaccaaatatatattttacagtatcatagtacctacaatttaaaccacaaattcattagccttcttttcatgcattactgtatctgaaccaaataaatttctgggtttctctaaatctctaacataaatatgttatgtttagatttcaatataatcatgcctaaaattagattggtccaaaattgaagtggaacacaggtcaaataccatcttaacaaattccacccatcaaagatctccatataagaagtgtctccaggctgcaagccaaaggtccgcttacttcttggagtacttctcagaaagatgacatttcaacacatcaaaacagcacagatacccacccctccccttcaagttacctataatgacatttgtcctacagttttgtttcaagagacataaatacttaacacatcactagctttcaaggtgagttttaaggttcatatttgattccaagtttctgtactttactctttttttttattttttatttggagacagggtctcactctgtctatttacaggcaccatcagagcacattacagccttgaactcctgggctcaagtgatcctgccatctcagcctcctgagcagctgagactacaggcacatactttactcttaacactgtgcaacgagtgctagaattttattcaattcacgactaccctctacctttacaccaagaaagagcatccattgggaaaaaggagccacaattttctctttgtcaagctgttttaagatatataacatgaatacttaaatactaaagggaggtcaatccagagacaaaatgaacataagagactactgagttaagatggatgtttattgagacaggaaagcaaatatattaaaaggtccaggcaagagtgtgacgcactacatcatcatagcttctgcgcaacatctcatgttatctgcctttcccgtaacaccaaaacaagtgtgtaccaacagagttcgccacctctcacgaaccccaccccacaactttccctaaaaacctctatcactttagtcccctcccctctcatttagcacacatgggctagctacaacacccaaatcatcacgggcttcattatattactgccccatatattagctgttattgccatctccctcaagagtattaagatctttgaaagataatctcatactatactcacattcatattacatagttcatgatttgtttgattttcacgttactgtaaatttgtaatgactaggtagtttggaatgtaggaaagtaaatatccatgaataattttttattaattaattcgatgttgagaataagctttattgatcttaactattgaattaaagcagctttttataggtcaaatataaaactcaaattagacacttttaaattaaaagactttaaacaacccaaattatttcaacaagcttaacatcctcgatcttggcacccaagtccaaaagaataattcgaggctaactagaaactgtcaaagctagagaggtatcagttagtgcaatgataattttggtatcatctgactatacccatcctagttttctcagttaacttccaaccactacaaaattctcttccatattaatgcaaactaatctgactccaaccttgaagatgtttcagaaacaattttaaagttcttaaagttacaggtgcaactgggaaaacccaactcaagacagtcttatttctcaacttagtttctcattttacaaactgtattttgtaggccgggcacggtggctcatgcctgcaatcccagcactttgggaggcagagacaggtgaatcacttgaggtcaggagttcgagaccagcttggctaacatggtgaaaccccgtctccacttaaaaaatacaaaaattagctcaatatagtggcttgcacctgtagtcccagctactcaggaggctgacacaggagaatcgcttgaacccaggagccagaggttgcagtaagctaagatcacgccactgcaccccagcctgagagacagagcaagactcagcattaacaacaacaaaaaagaaatcgtattttgttaggtttaaaattcaggcgaaactctactgaatgtcaactaataaatgtagaaggaatgacagaaaagtcaccatttttaaccatcacattagtgattgaagcaaggatcattaatggatgctaaaaccattgggtgaaggttactaaagaatatttacatagcctgaaagcttttctgcagattacctactaattacaaatgaaaactagtatttttattcagtggaaaaaccagatagatacccctttaatccaagtgacaaagctaagatcaccagtattaggacaaactgacaacacatacctaatgtagttttcctactgaaagtacaaaacttgaatctatttttgccgggggaaagaggggaacagagtctcgctctgttgcccagactggagtgcagtggcacaattatagctcactgctacctcaaactcttaggttctagagatcctcctgccttggcctcctaaagtgctgagattacaggagtgagccactgtgcccagctgaaacctgaatctaatcataaggaaacataaaacctaacttgaggtttattttacaaaacacttggctttatacactgaattgaagtatgatttcaaggatgatgtgttaattcatgcatagcagatgaagaatgtgttatttagggaaagttaagagacgtttaaggcactgttacatttggtatcactactacagagaccaactaagatagctgaaccagtatagataatcctcctcgaaaacttgtctgtaaaatattgttctcaagccctcttttccttcatcctccattatattactagaccatacatttcaatattgataatttgggggctcacaatataatctaatcacattaagactattgcatgttaaaattttctctaatacacgtatttaaaagaaaaatattacattaattttatcaaatgctagttatgtaccatgagagtttaagaaactccttttttttctcaaaacctcaagaggcaaacaccactacgacagtttatagacaaggaagctgagactcaagagacgttgccatatgcccagtgctcatcggctataaagtcgaagaatcaggatttgaaccctggtctctctgacgccaaacacttgctcttaagcatccctacaaagctatgataaaacattaatatttaactctgcaaagtggaaagaacttaaaataccatgaatcagagcaactgacagtgatggctgggcagcaggatgcataagaggcggacaggctgtgagttcatcatgttaatctcacctcccaggatgttaccaaaagaggaaagacagaaatcctgcaatctcgaaacatctcagaggactaaatacgactaaatacgactactacctttctttttcccttcaaacagggtcatttaacttcttaatcaaagaaccttcctacatcatgtcaaagatcagtttttaaactaagagtcttctctcattattcaagttctctaagtacaaccggtttgttttcttaaaattctgaactggttaacagacctcattttctaatcctcaagaattgttcaaatgtgttgttaaaacccctgctttatggcatacattgagctgtcaaagaacgaacaagcacaacagagttagtctgtgccaacaaggagaaagtctgcaatacagttaaactccaattttgacggcgattttctcccacgattcttaacacttccctcagtctgcaatgtttctgtgcacataatcatacgtacctcacaaagcaaaaaggaccaagtagcatgatttgtccaaaagcagaatagtaataatctttttaaaagccttaatatgcaagcaatattcttccccacaaaactgtgttagcttctaaatacttcaaaaagtattataaattaacttactcactcaacaaatcggagtgtctcctatatgtcaagcaccatgtctggtaatgaacatgcatgaagaatctaatccttactattccataaaccttaacacaaccaagaacatgtaatgctgttataagcctaaaaaacaaaaagaaaaaactctaaggccaaacttaagcctgtcatgtcttacttctagtaacagtcttactgacatcctcagagaatgttttgtagcatcttcttagtcacttatttaaaatgcatattgaggtaactgcatgttaaaggagtaccaacaattcattgacaattttagatgaggaagccattttgcactcagaattattttaacaaaggctttattacataactgaaaatgtcaatttcaccagctacatctcaaaaataatctttttctttctgtattaattcatcaagtatacaccacgatacaaccagtcttactttttagaccaacacacgttcctaaagactgggtgagagggctgggcacggtggctcacacctgtaatcccagcactttgggaggccgagacgggaggatcacgaggtcaggagatcaagaccatcctggctaaacacggtgaaacctcatctctactaaaaatacaaaaaattagcagggtgtggtggcgggcacctgtagtcccagctactcgggaggctgaggcaggagaatggcatgagcccaggaggcggagcttgccgtgagctgagatcgcaccactgcactccagcctgggcaacgtagtgagactccgtctcaaaaaaaaaaaaaagactgggtgagaattcctatttggaaaatcctcactgcccatgttgtccacagagcttattcctgaatggattgttatttagcatctgtcaacagcctgaatgagacaactgatattcgagggacaccacccaaaagaaattaatgaatcaaaccactggaacagtgaacacctgtattactaaagcttttctattatgcctgaggcttttatccagtttctctaaaatggcatgtgaaaaaatgtttctctatcgtttgtaaaatgtaaaacattttctccatatattgctaatgttatttaatgtaataatccaaaagattgattattcttcatacaagagaaaaatctgcttcaaattggtatgcttcctttcattaatcaacgtgagttacatgcagcactcacctttccttgccccaatcattcatctaattctctgcctccacattctatactaccaacctttaccattttcatagtactctaatactttcctattataagaccatttcaaatcctttctcaaaatagacatcataaactattaaataaatgtactaatactagagtcttagcagaaatttggaagaagtgaaaactagccatcaaaaaatcaaaaggtccaagccccacaggctaaggaggtggaataccaagaaaataatgctgcctcagaagactagtcatttggcaagtcgtaaattgcaaagaaacctgtgaataagagcgagtataatacatacactgggctttcaggatgaactaagctcttgaatgtccaaaaagcacagcaaaaggtaaacaaaataagtcacttggctccaactttctctttatacaaattaaagacctcaccaatatcttcctctggcattcaataaagcacatcactccatgtttgatcagttttttgaatacctgccagacactatgattggaaccaagatcgtaaaaaggagtcgaccctgggcttcagagagattacagattttactgacagaggagttgtttgtaggaaattatcactgcttggaggaaccctgagaaaactcatactgcaataaattctgagtctagtctagtgttttgaagatcaagaaacaatgtgaccactttgaggtatatgtctaaaagaagggaaagcatggactccaatgaattatttgtatacctacgttcacagcaccattattcacagtagccaaaagatagaagctacccaagtggccatggacagatgaatggataaacaaaatgcagtatattcatacaatgaaataccattcagcttttccaaggaagggaattctgacatctaaatcatcacagatgagccgtggagacactatgctgggtaaaataagccagacacaaaagaacaaatactgtatgactctacttattttgaggtttctccagtagtcagtgacaggaagtagaatggtggttctctggcattgaaggtaggatggaatcaggagttagtgttaatgaggacagtttgagttgggaaagatgaaaaagtatggagatggatgctggtaatgactaaaaacaatgtaaatgtactgtatgccagctagttgtacacttaaaatggttcaacgttgtgttatgtatattttaccatgccaaaaaaaaaaaaaaacaactatctgaaatattcaaataaccattcattcacctgaacatttaaggttagacacagcttcattcattccacaagtcttaactgaggagtcactacacgtgatgcagccctgaaatccatttggaacagtaatgcaatacaaaaagcatgcctccaaagattctgaaaccaaaccacaattcgatctcggctctgccacttcgagattcctaacttggggtaataatcactgactcttagtttccttgcctataaaacaaggacaatatcgagttgatcgcagggtcacagtgaggattagaagagaatgtacgtagaacctgaaacatcttggcgcataacaaggaggcactcaataacacgtttcccttatctcctttgccatgagcaagtggaaacgtgaccatgacatggtagggtcgcaagtgagagactgtctacgaaatatctactttctcaaatgaaacaagcacctcacatgtcagatagtggtagagaataaaacatcccaacgccataaaagtcaccctctctagaagatagcactacaagtactgtacaacccactatatgacaaaatcactgtcaaataagaatcatgagccacatcaaaagacaatgtcttctaaaaccaagacaataaagctcaataatagcaaaacaacctagctacccaactcacacattgagccacgggcaaaatacagcagagcagtcagggcttacccttcaaacatgagatggaagcataaaaagtaaagcaggcccttactaaaaaggattgtaggaaaatgtcttttctccccaaattaaaatggactaactgttctcttcttaaaacagcattttggtgccgtgagtaaatctataaacctatgttaccatgatcaatgtttatagtgaccatgttaaaagcaatctttagttttttgtttttttatctattgagttttatggaatatgccctaaaatgaagttttgaaataattgtgtatgtatgtgcatgtacacagcacatattacatataatacacacgtgccacaggtagctttaaagtagactttgcaaaataaactggctattccagaacctaatttccaaagatatcaataatattgaaaattactattctctaggacctggcttatcccgaacccatcttttaataaactgagttttttggtgaggatgtatatttttatttagaaaacttaacgtttacaccaatacatattcaatatagctaacctgttttaacagcacatttttaacaatattttccgagttgcttaaatcctaacctgagtccttttccactgtttgaaaacaagcaccacgaagacacctgacaatcaggattgtaaagattcagaatattcgaagacagaagcataggcgtccaagtgatcctctttcatcagatgaatgtttttaaaacctgaaagtcctaagaacacttacttatcgtgtagaccagtaacgtgtccctttaaccacaactctctccacaaaagcacggagttaacactacacaaataggaccctccaactcatctccacgtttccgcggatcttcaggttcctaaggacacactcagtggtttgctggctctgacctccaggcagagccatcagggcaactcagcttttctggacaatctacagaaatctgatgtgctaacttaaaacatacactgatttccccaaaatcaaaaaccctgaagaaagggtcctccgcagggtctaggcattttggcacaaaaacatctgaggggagaggcaaaagaatggcctcggcccctgcccgccccccagggccccaatctggtcccctgacagtaatcacacaggaccctcccgggagggaccgagagcccagcttcgtcccctccgggcgcggcacagcggccccatcagaggagggccccagggtgctccggcaggtcaggcgcgcgtctccacctccgctgctcccgcgccaccttagcgcgcgtgacgggacctgtcaagagccccaggcctcgccaggccggggagtggacaggcgccggcatcccccaccacgccacggcggcccggaaagtctcccagggctgcctcgcggggaggcgccggggtccgggcccaggagcagagccgaggcgggcagacgccgggtccacaggccgcgctgtgcgggacgacgaggcaggcgaggccgcgcccttcgtcagcgcccgccaggcccggacgcgcggctcggggccatggccggcacgcgggcctccgcgcggaggcgggagcgcggccaggcgacccgctccccgccccggacacaaagctgctccgcgggagcccgcctcacctgcagcacggggcgccgcgggccttcgagaaccatcggaccccgctccggcgcgcgcgtcacagcccaggcctcccggagccgcccggcgccgccgcccccgccgccatttcctcgcgctcgccgtcgcctcgtccccgctgtcaggttactccattcacctgggcctgcagcagcctgcgccgcgcctccgcctcgacccctcccgccggcgcctgcggagactgcgcagcgcccggctggccggcagccagcgcacggcccgcggcaacggcgcacagccgcttggagaatcccactggctcccgcaccgcccctccgcgcccccacgctccgctcgccccgtggcggcatgagagcgagcctgtgattggacagggcctggcggtgaaaggttaatcccggccccccagccactcaggagcagggagacagcgggcgcgcgcgcggaggccggagaggcgtttgcggcccagcgcctggactggaccttggcgttgggccgcagttgcccggagtttttggggcccccgggaacccgcgcgccgaggccggctaagtttggcagactctctgagctctcggaattcgactgcctccattgttgctccttctggcacccacagaccgtaacgtggccgtaattgtttcccggagagcttagcttccctctgagcacctccctcccctttttaaagtaccttcccactcgcctgcgtttcctcgcgttagtggtgcaggggcctccgcatttggggaaataacaaacacccacttccgccccccaccccaaccgggatccccagataatgagaaatagatggtggccctctgtttgtaagctgttcatttgcataggtcggaaccgcgcaccacagcttgaagctaggaattaaaatatcggtgggaattaaataagtggctggcttaaagaacatcttcttaatttatccccaaatgtagacatctcttcagtggaccccctgataggccggtttgctccaggtgaggtgtgctcacagcaactgcaaccgtgtttctttcagaccatgggcgtgagcagaacctactatgcgcccctgctgcctgggctgtgctgttcagtttggggccaccagccccacatggctcctgagcacttaaagtatggctagtcggaatcgagatatatgcattctttaccaaataatgttcaaaaaattgttacatgttgaagtgataaactttttccatatattgggataaaagttttatttgtttattttttagtgtgggttctacagaattttaaatgtcacctgtggcctgcattatattgccattgggcaggctgatctagggcttgcatgcctgtgatccttaggtgcaccctgtgaggtaggtgctttaactgtgtgcaccctgtgaggtaggtgctttaactgtgtgcacattgtgaggtaggtgctgaaactgcttcctgttttttttttttttttcttttgagacggagtctcactctgtctccaggctggagtgcagtggtgcgacctgggcttactgcaatctccgcctcccaggttcaagtgattctcctgcctcagcctcccgagtagctgggattacaggggcacgccaccacacccagctaatttttgtatttttagaagagacggggtttcaccatgttggccatgatggtctcgatttctgaccttgtcatccgtccgccttggcctcccaaagtgctgggattacgggcgtgagccaccgtacccagcctgcttcctgttttaacagacgaagaaatggaataacttccaacaagtaagtagccagtaagtgaacaactgagatttgaacccacgtagtctggctttgaggctggtgtgctcagtcattactgtgctaaaattttgataatatatttactatgaattggcttaaggtttcacttgaaagtagcatatttatgggcaaaattaggaagtaggatgctcctggcagacccatgtatttaaaaaagtagtttcttatatgtcaagcacggtgagcatgtcatacctttaagaccccagtcatacatataaggttttctttgtagctaggaattaaaatatcggtgggcgttaaataagtgtctggcttaaagaacatcgtcttaacttatccccaaatgtagatatctcttcggtggactccctgataagcctttatgagaaggacagcatctcagtatgggggtaggcactggactctattggcagtggaaatttgtgggctggtacaacttcagcccctc

SEQ ID NO: 153 - DNA, 418478 bp, Homo sapiens
  source 1..418478: mol_type = genomic DNA
tgcctgttattttgttcatagaattaacataacagaccaacaaacagcaagagctgcaactgagagtatgcactagacttgagccgcttgtgcctgcaatatgttttgccagagggacgtgacaatgacaccagccgacattctcattctacaaagaaaacccagggattacaggagaggttgtataggatctcagcatgactttctagattctggtagaaagaaatgttgagtatgtcagtagggatcaggaatcgcaagttctactgagacaacagtcagagctgagcatcgcagcaaatgcggcagttaggaaatgactccttgtgctaagcaacctctccacagaagcagtgtgactgcttctgtccaggtggacagaccattgtgagtgcactgacatgtttcgtggaggattcacaagacaaaacgaggactggccagccaacagaactactcttggttgcatcctaagaacccagccttgtgcgaggggccgtggagaatgcagaacacaacttcacagtagcaaatcctatactcacccacctgcgctggcacacacacacaccggcgctggaatgcacgcatgcacggcccaaaggaggccccacgggagcagttctcctggttacctggtttgtacttgaccggtcacggtgagggctgccatctgagaagcgggagcctgtgaagaagcatctctccctcgctatcttctgcttcatccgatgcagccctgcaggtctcacaccagccgttcactttcacacacccaaagcctcattctcagtcagcgtgggattgtcctgaaggaaagtttggggtcaggggaggcaagtgaaattcgaacacaaaggcactcagattacacctggtgccatgtgtgaagattttagttccattgattttttttttttttttttgagatagggtctcgctctgtcgcccaggctagagtgcaggtggcgtgatctcggctcactgcaagctccgcctcccgagttcatgccattctcctgcctcagcctcccgagtagctgggactacaggcacccgccaccatgcccagctattttttttttgtatttttagtagagacagggtttcactgtgttagccaggatggtctcaatctcctgacctcgtgatccgcccaactcggcctcccaaattgctgggattacaggcgtgagccacggtgcccggccctagctccattgatttttcttgtgaataaacacttatcttcatggaaccactagtctgaaggccagttgatctgctactgctttcccaaagacaaagccataagaattcccagatcttgggcaaaagatgcagcttttggttgtcaaatggataaagacaatttggggtggaacagtcaagtactcgtacttcctgacacgcaaaggttccctacgatacagctgatagaaagcatttgcacacaggactcacgctgtttgtccccaaattaccaataatctgtacacttgcagcaaaatgtgaacaaatatatttagatatatttaaaagaattaaaaaaaacatttcacaaaacatttgttgccataggaattatttttagcaataaatgcccacatcaaaatttaaacatttttcaaagtatgattatctgtactaagtaatgcaacaaattatgtaaacagagtcagatacatttccctgtaggagtcacttccttcccgggattaaagctgtcccagacatctttccaggggaccaattaagaaactgctattttcagagcaacaaaaataaaagcttttatttgttcatttgaatataaaacaggcgttatcacagatgtacaaagcgtactggtggtttaacatacaagaaggttgctgtcctttgcacataaaaattttgtttgaaactgtggctggttgagtacatgagtttctctaaccagtcaccacactctgaaataacgctgctaacattcaactgataaaagggaccatctcccttgggtaaagtgtcaagcaggattaaatatatataataaacaagcaccatgaggaatctgctcctgtttgattaggtctgtgtttatatgttcactgtgtaccctctttttgtgcaagttgattacacggttttgtctgacttcaaaagcacaaggtcacaagacaaacattttttacaatctcatgaatgatttatctacagtacaattttgaatacagaatgacccttctttattgctgaaactggtggtactaagtgtctcctttcctttctcttgcacaaccaaatttcaatctcagtccaccaactcttttgagcctaaactctaactaatcagagttgacaggatgcagaagaggcggctgctaactgccctcacaactgcactgcagcgtccacactccttgaatgtagagttgatctggtgacagttgaaattatgtttgaagtgacatctacatttgttttgcttcctgacttcagctggacctcaaagctgtcctgcacactgcagctaatgtttcatagtcagtgcctggcctgaagccccaaacctacctccctttcaacaaggtgggtgggtgtaggaaaatgtcttttttccccccaatgtgtggtggttccccccttaggaagcagagactaggaatgtgcatctgaagcatgtggagaaatattcacacacagcaatgaggtcaaacaatatttcaagaatcaaatggtttgtggagatggaaggatgcaccacatatgcagacacatttttttaaatgtgccactttttttttttttttttttttaacaacaatcagccttggatctcagaagtcaaacaaaactcttttagcaaaaggcttactgctgactgcatatagcaaaggcagagaaagacgctgcccacaacataatgaaagatcatctacattttgcccagcatcaatcttagtcatgcatatctagcaccgagagccactgcggggtcacactggggcagttacagaacacatctttctcggagtgcagatgctccttcttggttggacaccgtgggccaattcaatttagaagtgcacaggtgagctctgagaaggtgtggccaggagctgccagggcagaaactggggcgcactcgtccacaggcggcaaacgacgcagctggaggacttcttgcttcagccggagctctggcatgaacccccggggaactgtgctcactgagcgagggagccccagaggctcacacagagcgggctgggtcttaagacgaggggacgatcaccgatgtgagttccggacactttgtccactccacattggccatcagagggggaatcaatgcaacccagtgcgaatgaccacagaatcgcattccttttcgtagcaaggaccaaaaaaagatgacattaacaaaaatgatgaaaaacattgtgcaatgaattcttgcagctaagaaaacagtgctatttgccaacctaaagcccctcagtatcatcagcacacgctggcataaacacattcactgttgtcccacagcaaagaaaaaaatagtgcacattgagctttgaattcttttgccatccttgagatggcaataatttcacttgctggtctctggttctagaagaaacttttagacagggctcctgcggtctgcgactgctggcaacagcagagtgtatgtgagtacggggggcacaccatgcaagtgacaagttctgcatcttaaactttaaaatctcctttgttcattagtgaatttatatttcatatatatatatttgttgtgatactatccacgcaagataatacaacacttttttatattagcaaacattacaagactttaatattcttgaatgtttttctcttttatagttctaaagagatcaaaataaattaaacgttttgtacataattacatattgaggaagttaacttattttatctttttagtttagtacaaagatatttgcaagataattgccgaaatacaccttatttataatttcttctcattctatactaacttcgaaggccgtataccagcctttgtttcttcagcacatttctgacaaagaaagctgctattatctaattggaaggtgctatttggaaggttttctcgtacctcaaactttcctaaaaggatgagatctagcaatggcttaaattagtaacagatccatgtcattaagatttcatgacacattaaaacagagaaaacaattctttgtcacactacataaattgtttaaaagaacccatctggagggcaggatatttttttaattgctatttcggcttaacaaaataccacatttacgaagaaagcacttattatccaataattaaaaaagaaagaaaagaaaagaaagttttgaaatgggcttttccaacaaactgaaggcagtaatccaaagtccttctgagcgaaattcagtggtaaattcacatttcacccccatgccaatcgtggctgctgtgagaagtcctcttcctcctcctcttcctcctccactctcaccacaaatggctgtattctggtgagtgttgccctgtgtctgcacgcttcagtggacacggagaacaatgtctacatctctagaaaagtccatggaagccaagagacgagactacatgttgtaggccacatagatggggtctagctggtctgccaaaaacccgtctcgcaggtgcatgcgctgcttctccccacgggagttgatggggatgacgccgatgtccaccacgaccaccactccgacgatcaggtagtgctcctccaggaccacgttggtcaccaagggaaccaggtccaaggcttcttgttccgacccatccagctcaaccacaaccaccaacaaatttgtccaggtaaacacagcactaaaagacagaaaagaaagccatcattatatgtttattaatgctttatttaatagccgtggtttcaaagttccacttggctctctctgacctgcctgagcactgcccgacagtctcctccggcctctccacgtcctccgtctgccgcccactaatcgttccccatacagacttcctggcgacagcacctgtcggtgtttcctaccagccttctctctcggtggcttctgcgactgtttcaccatcttcccgagttcccatttctagcacagcatcactccacctggccagcggagtctgtgttccagtgctgcctctttgctgctgcctggaggaccaatgccctcactgaacagtgcagtgtgccatcagcctcgtaccctcaaggcagccctgtgcctcctgcttccagacccccagctctgctgctgagggccgtgcgtgcggaggccgagggcaggggtgcctactcctctctgtctgtgcggtggccccgagtccagctctgctgctgagggccatgcgtgtggacgccgagggcatgggtgcctactcctgtctgtgcgcccgagtccagctctgctgctgagggccgtgcgtgtggacgcctagggcatgggtgcctactcctctctgtctgtgcacccgagtccagctctgctgctgagggccgtgcgtgcggaggccaagggcatgggtgcctgctcctctgtctgtgcagtgcgcctgagtgggggtgtgtttcccagtcctggggcttgggctcagcatggaacctggtcagcctgtgttagggagatgaatgccggtggaggctccaggagggctggatatgggggcttctcctggcgtgcctgtgccattgcaaggatggggacacacctgggctggcccttgggtccggaggataagaaacacgtggagaagagccaccagtcctgtgcccagctaagctgcttgccccagctgagccagccccttgaacgcagatgtggggacattgtaacaactctctctaaagcactgagcatgggctggctgccatacagccatggctaacccatgtgcagggaaaagtcttctggaatatggaagattcactcagaaatgttttatctgggatcgagtcatctttcagcaggacaggcaccagaggattaagtctgcccaactggcagaagcaaaaacccggtgctttacagtttaaaggatatttaatggcttttggaactaactgtttaagggccctgacattcacagagcctggtacttgaggtctgcttggctgaggaggccagaaggttcccgggcagagtgggctggatggagaccaggctccagggctgctcgtatctgctctcacgcacctgacaaacatgttctatcccagcttgaggcaggagatattttaggaaactcactattgttctaagtgggagagtaagtcagttaggaaaaaaacgcatattttattcagtatggccaacctatgttaaattgaaagggaaaattggagaattttcctggaaattctcaacagttctcctggattttgctttgtgactgccgcatgcctatggagcatgctaagagctgtttcccagaggacgtgctggcgcttaattcctgtcatactgctcctggtgatgttaaaatgttgctctacatggcccatgtgagcccacattgtgaatctgtcatatcacagatatagacgtctcaggcgcatttggtatacttttattacggcatttgaaatgtatggaatagtcctagagtatccaaatctgcttggctctccggaggaatcagcttggctctctggaggaacagagctggccgagggtgtgcttgctccactatctcctctgccagggacctatggggtggtgccagtgactctcagagcttttacaggagctgtgcacgctatttaatgctgagaacaactgatgagaaatgagaaagtttgtttggcttgaatttggcaacatggagagtcccattccacagcgctgggtgtcacagccgcatttctcagcatggagcagccgatggtggccccaaggggcagtgcagggaggctgggagagggaaggtggagcaaagcagtttgtacctggatcatctcaaacattcaaaagtccactcaaaggacactgtgtgggcaaggggcatgtgagcccctgacccggtgagggacagatccagtttgggggtcacatggcaggtaacagcagcgacatttgttacagaataagcaccacggtctagaagcccacagagggcaccagcgaggccctcgatgcacaccttttagcgggaaaccagacagaaaatgcttgagggaggtcacacaagccaattaaaattgttttcttaaaaatacaaaaacggaaggctgtaactgatattcgtagctatttagacggaaaataaggtaggccctggccgagtttctgggccaaagtcttcctagagtttctgtcttctctgtatactcaaggagagaagtgtcaaggaaatcgacaatctgaggacttttgagagtaggggcttagccaacttgagccacacgaacacggacaggtatgcagacttgatcttgtaaattctgccaaggccttagtgttcaaattcagcaaatggcagtaagtaccagcctttattgcatctcagctagctaagaggaggaaggaacaatctcagaacccatcctttcaacccagaagagctgttcatgagagtgcagaacatacctccctcagggtttctgacctgagactgagaccagtttcaccaggtgcccctcagttagcacccggtctgttatcaagggaatgaacaagtctaaagccaacggtgttgagtcacttttcatccaaactgccaatctaaaggcactgaacaagcctgtaaaactccccggccctggccgacttaacttacggcactccagcatccaatccactcccacacctcagaagaacctactgctgaatctccggcagcaccattgacatactcagcacttcacaacagattaaatgggccagagagaaagacaaagtcccagcctcagagtcctcacctgggcccagagcagagtctgcccccaggcagcaggtgcgacgcacacaccttgtcactgtcagccttaactcaagcaattcttcctttggaagtctcttctggggtctggacaaacgctgcctctccttctcactgaagttttcccatgtctcatgttacttccagttcccaagtcaacagtcataaaagtattttctgtgcctacatatgtgtgaggtttgttttcttcctatatcatgattttgtaaattaaaaaccaaacaatttggcttcctggaaaatgttgtcaagtagttttcacggcaatagaagtctatcgttttcaggtaatatatggtacattaactctacatgtggcatgttcttttgttgctttaaccccaaaagataaagatttatagtcaaatgttgaatcgcacccccttccctaccttaacaaaactctcctccaccgccgtgctctccacattctcaatgcttcacaaactctgctcctgatttgggtacaagctgcaagctcacgacttaccattccgtaacgcttttatgggctctgatgaccgaggtctcaatgtcgattgggtggtaccgcatgccccgcagctccatggcttcgtccagtgcccctaccacgtagagggcatcatggcgctctgtggagtaatgacagcctgcgtaagcttccccataatgccgctcaagccgtttccttcttttcttaaaaaaagattaaaaacgacccccaagtgagacagggatgcaaaggaaggggctcacggatccagggacgtttgtttccttctgccacggagctccttggcaagtgctcggctcgtgtgccagtaccccacaggctggctgcaaagccgccatgcgccctctacacttgtgctttgggagaagatctttcctggctcagcttcgatatccagtcaactgcctgattgcatgttcatcgggagcaactgaggggcgaagtcggcacccagcggtctgagttccgtggacccatcggctgaggcctcgtctgcccaagatcacacgggatacagtgcagccacagtcagaccagctctgtgactctatcccacacatgcttctctgtgctactaattctgtgtataagtgggaaaagaaagcatagctcttgctcttgttcatgaacatttccttagctcatagagccaggaaatttatttctatccttcttgcaaacctcagaataatgacaatgacaacaagtggtcaggtcctatctttccttaataaggaaatatgtcctaaatttttataaggtagtaagcatattagggaaaatttgaaaggcatgattgacatataaaataacatcagagttaagtattttctcccatccaagtactaaccaggcccgaccctgcttagcttccgagatcagacgagattgggcgcgttcagggtggtatggccgtagacagagataagtattttctaatttaaatcagacaaagaaagatggagacattgactcggcctctgccccctacagcagctttgcctcttctcctgtggcagggacacgtccttcagggtatccctgcttccaggactcagcgggacgtggctttcctggcctttctctaggactataaattgccaccagcttttgcagcttccaggaacctcaggcagtagcctcaaactagtctataatttcccacaatgcaaatgtcatgccaggatatttctgtatgattcctaaacatagcctgttgggccaggccattgtaggtatgttagagaggtatgtaaggaagccttactgatgtctgcaaactcatctccctgaggttttggtgagtcaagatctcaccaggaacctcaactgccactgttgtgaaacagccaagtcctgcctctatttttagcagaactaaggaggtgagaaaggattctggaataagcaaagaattaactatacaagtgcacttttacatgtccatgtcatgaaatacccctggcttcaccctgctctcctctgatggggcaaaggcaatgctgtccacctggctgctccacaccaggcaccagcatcagcagcaccaggccctactctctgatgaatgcatgggcagagacagctggccaccagggcccgagagcctcgcggcctcctcttccctgacaggggcagacccagtcctagaagcagcagcatgcacgttcctgcagccactgggacagcttctgtctcagatggaccccgtgggagcaggcagccttcaggcttgctgaggagactctgtggtctgagactctgagcactttgctgtgggtgacactgcagcccatgctcagcagccatgcccctctccggttttcagtcagctcttggttctcaggacaggacagggtatgtgatgcacagctcagcttgttggacacatttgcattttgctttcctcttgctcttaaactcggttcttttcacactgggttgtagctagcacacgtgccctcctggctttggctgctgtaaaccttgggaaaggcttctgtatctacaggagcctaacctctctgcccatctgttgggggggggccgccagcctggactctcacctccatttgcatctgtgagctcagttctccgcaggaaccccaagtagcctgtgcgtgcccagatggtctgggtgtctccaaaacttagtcttgagttgaagtgatctgactggagggattcgtctccgtaaatagtgaaataaccgctggcattgtgggcactgtgaacccaaatctgcaaacggagggaaatgtcactgtggatgacattattttatctccagggaaatgagactacaactactttgacaattcagtacattatattcagtgatagtaaacgtttccttggactgaataaccaagatgatgttaatctcattcgggtttctcgagagacacacagaggatactgaaataaaggcagtctaccaagtttgtggccaagcaaccagccaaggcatccctatggggaactgaattaaagcagattagttgaagatttaacaaataggttttaaaaatatacacatcaaatgaacaaagtcacactagattccttacactttaacgaatgattatttctaaagagcaagaacaatgctgaaaagctttgagatttcttttctcatttcacctggttagctaatacttttggacatatattgcaataaaacaacacacagaaaaacaaaacctaagggatgaaggcacataacaccaaaaaccggaaacgaaaatgcctgatgtctgacatttggggaaataggtaagcaaagactgatatggtgagtcaaagcgatagccacgtgggttacggagaaccatggacagggctgggtaaaagcaaaaccagtgaagttccacagatgcccacgcagctgtgcccacacagcaagggtcaggagaggcagggccttgtagactctggagtgtttgctgtggagacattctgggcttggctgtttccattattttactgacaatgaaaagtggtcaagttccaggaagtcagaaactggtttagtactgcacccacgtccccagagcagtgcctcacatatggcaggcactcactgcctgcacaacaaatgaaaaagtgaaactgagagagacagtgcaccatcagatcagggaaatgacagccgtcctctgttccctaacacaaagaaaattctcattaaggcaactgaatattactcagccataaaaaaggaggaaatgctgccatttgcaacagcatggatgtacctggaagacgttgtgctgagtgagaagccagaacagagaaggacaaatactgcaccacctcactcatgtggaatctaaaaagctgagttcatagaagcggagggtaaacggtggttagccgggacttcagagtggcaagggggagatgacgggcaagggtgcaaaccctcagttagagggcaaacaggttatggggagaaaatgtagtgcggtgactacagttaataatactatatcacttaattgaaatttgataacagaatagatcctaaatgttctcatcacacacacacacacaatgtgagctgatggataatagaactcggtcgtggtaactgtttcataatatgtatatacatcaaagcatcacagtgcattccttaatttatataactttctcaattaacctcataaagcggaaaaaacacacattcttaataagaaagtcaccctggaaatttcgccagttctggccaccctcagagggaagagaattctgaccctggcccagcctacgtctcgggcagcacccgtgaggacaccctccaggtgccggagaagcaggctctgcttccagctttgtttctaggaacacatttaaaggaaactcctaagtgagagctgcacagaattttatctccgcagttctgatctttcatgtatgtgactgagagaggtcaagtgaggggccaaaaaaaaaaaaaaaaaacacaaggcccaagaagcaaagcaagctgggacgtgagaactggggagggcttgctcattggtcaggtgttcacccacgtgcgtgtagaaacgtgctcttgcatgtgctggggatgcgtccagggctgaggaggaggagggctggtgctgtttataagatgccagttcttagcacgcctcccacatgtgctgctgggagccattcaggaaggggggcgcctcatgggacaggacaggtgataaggggagtgagggtgtccttggccagacatggggctttgtccaacggcacggcaggccggggtaaccggagggagggcacacgtgctgccaccgtgggaggaggctggctccagacatgctcttctccagtgccctctgcttcctcatagaagcaggaagctcagtgccagagagaatgcggcggaaggaggacgcatgagacaagtggcctctcggactggggacgcccagcagtgccagggcctgcttgagatgaggtgtcaagagaggagaccaaggccacacagctccacgaggcgtctttctctagctgcatcccgccagtgcggaggggcacagtggcagggagttaagagccagccagggcgggctcattctgaacacaatgaggcaaaggtgtcaagttccactgtttgctttctgatctgaaataaacacatgatctcttggctactgtgtcctgatgctgttgtttgtacactacttcctgtggaggtctctgccactttcctggtgaaggacttctcagtaataaaagcaggaacgtggaaagcaaactcaagagccaagaaataaagaaactcagtccatacacattatgtgtttaaatcttttcagaattatttgaggacaatctattatacttccctaaggaagtgccattttgtaattgtgagctttcatggactcatttgagccataaagcttacctcacgctatttcccaggcaatcataactcactcagctcaaaccggtgtgtggcagatggagggcatgtgagcagttctgatggtgtcaaggcaagccaaggatacataacagaaaagtaacctggatctcggaggacactcaactcacctctccaaggtgtgagtcccccagcggtccttttgtttctgggttggcaattataatccgaacccctggaagtatctatttgggagaggaaaagtctcttgtcaatgggaggaatacagggagagactacacacaagccaacctcaatctcatctttatgccatttcctttcaagactgtttagaaagcaattaaatcaaaactatatgccacatagttatgacccattatacaaccacagcctcacaatcacagcctcacaatcacattctcactgtaactgtcaatattgtatgctgttatggtgacctcaaaattaaacattttgattgtcagtcatacctcaataaagctaagagaaatctattgaaaatcatgaaaataatgtttgaacaaaaacatggtaaatgatataatgtttaacacagcctgaccttgaaaaatgggaattttcagttgtttcaatgaagttatttaagatatttacatagagtcaatattacatctcacatcatggcacacacatggatggagggtgatgcttgcagtaatcgctgaaggaagggagtcacatagtgacgttttcaggggtaagcatggactcgaagataacccaaaatgcttttggcaaaatgatatagtaggcagctgctctggtggtgccagaagggaaagattgtgggtcaactgctggtgaagtctgcaggttttcgttagaacgtccgtgtggatctccagctcatctccaccgaattttcaactcaagatactggggaactttttcctgcaggtaaacatcttttactgtaatagatgtcagtactaagcatttccttctttttttttttgagacagggtctagttctgtcacccaggctggagtggcatgatcacagcttactgtagccttaagcaaccctccagcctcagccccacaaagtgctgggattacaggcatgagacactggctctggccagaatttccttcttaaagtttaccttagaaatatctcacattccactgataccacttatataaggaatcaaaggtttattctggaaatcctgaatatagcctgcctcagatcagctcatctaacatttatgattgagataaaggcaaaacattttatggtaaaaacacagaacgtcttggaatagtcacactgttaaatctcacttaagtctgaagtgagatttcagggctctggattctgctgctgactatggtccgccagactgttaggatggatggtgagcacattcctactgttggaaccaactctgtgaagcattctaacttgcagccatgcaggcaactttataatagaagcaacatgagatgctcttagaattatgtcaatggagaaggaatctgacaactggggccgaaacggaaaaaaaaaaaaaaaaaagagtctttatttaggtgtttaaatatctttcttgccctttagttctagtaaaaaaacaaaaaaacaaaaacagaaacaaaaaacacacccactgtggcagaaactactggttgtctcttgttaaccattcttttctactttcatagtaatagataccctgatttttaggtaggcctttacatattcagaattgatatctcaatagttcccaacctttagctaggtgtggccatgtgaccacattctgatcaatggaatttcagtgtaggacagcttgggaaccttctctatggtctgcatgctttgttctcttctttttctgtttctcctcctgctggctggaatgtggaaatgatggctggagcggaagcagccgcttcagctcctgaggggcccctggtaattgggctccaatgcgcagaacgaggctgaaggcaccagggcctctgctggcttcatggaggaggagatgcctatttcctaacttttacctgaggaaaaaagtctaacttgtttaaaacactgttattttgagtttctatactcactgatatgttactttcaagaaattgttttggaaaaaacattctaaaaaatacatttcctaaaatttcaaagcccatacagtcagaagcgaacggatacagaaatgcgtgcctcttcctataatacttacctttcccgattccatcaggggcagactatgaggggatcctctttccactaagcggactctgcaaacagaaagagaaaatattcctagatgtgtttgctgtccagttttccccttcaccaattcacacgaggtcacgagcctggcagctgtccgggaaagctgattctgagcatcatccaacagcaaggacgaagctgcagaaagagcagcccagcagcagaggaaactgaacccgaagcgagggccacagagaaggcagatgaagccgcatctctcaaacctgcaaagtaactgggaaaatgactctgagctgaaagtaaccatgagtccacttagcattttcagaaaaggaaaagaacacggattacagagtttccttgaaagagctgcgggtcacccacgactgtgttgcctggtcctcaagcaccgacggctgtcctgcgggtggaaggcagggccaggtgtgcagcggccgagagccctcccaagacagcgcgtgcatcgcagccacaggagcagagagaattgctgggccctgacggcaaaggtactcagaaaagaaactcttacttcaaagaatacataatgataatttaatcttaagaactgccaaggacatcgcagcaggccacaaccagagcttcgctaacagtcctcccaggtgcattatttattttgaggccttcactactggttttgcatttttaccaggtgcctagtggaccatcacactcttcattcacctaaggggcaattttttttatttaaacaaaataaagcaaaggagaaagtgcttgaaggcttgaagatggtgaatcacaggacgacatgcctcccacctggggacagggtgcgggcagggggcctgtgggctcctgagacacccttcctaccatcccccagtgatgtttttttttttttaaagagacagggtctcgctctgtcactcaacctggagtacagtggcacaatcatggctcatcgcagtctgaccgcctggcctcaagcaatcctcccacctcagcctcctgagttgctagggctacaggtgtgtactaccacatctggataacttttaagtttctgtagagaggagatctcactatgttgcttaggctggtctcaagctcctggtctcagatgatcctcctgtctcagcctcagaaactgccaagattacaggtgtagccaccatgcccagccctcactgagatttgaaacacaccaagaacccactcttatgcactcgacacagcagtcttcctctgtaactgacagatgtaccaagaaggaggatgaggggtagggaaggggcaggaggtaccaagaaagaagcctgagtgtctccgggccctgagggaccagtccagcacagccctctgcgtggcacgagggaggccacggagggtgcgcacccctctgggaatgggggtgtttctgctgccacagtgggaggcacccagcagtgtggtaggtggcaccggcctgacgtcctccacgtgccagacatgtggctgcactgctcctgccagacctagggctgtctgcagccaggggcaccatctcctctggctgttgagtgactgaggccacaggacaattcctccccccagcctgctgtgtcttctccggttgctgcagacagaagcacccgtgccggggaggatcctctgtggcggaaacagggaaggccagcagcactttctcctctgcgggagaacagagaggagacgctggggagggtgcctgtgtgcatcagcaggagtctgatgagggagaaagacttactggagccatttcagatcagatgacaaccattaactctgtggtgtctgtcttaaatggaaaccttgatgccaacagctgatgagggctgccaaacagctcacatgattcaaactcttacggaacacgccgataggcttgatgacgctaacctccaaaaatgccttaactggctgttttaacacagaattgcaagaaactaaagaacttttaggagcctggtagcattatgctaattcaggacttgccatgagaatacctagaatttgcggtgcaacacaaatgtgctctcctctggacactgaccacggagaagctcacagccagaggtggcatgcacatacttgggatgtcggcaggacatggccatgccaggacaatgatgctgactccttcctccgtgccaggaggcccgcagatgtgccctgatctgagcggccaagtggagtcaaaagccagcgaaccgtgggcttcaccccaaatgaagacagcagtagagaagccaggccaagctggccggggcagcggtgagaaaggggcacctggagatgatgaggagagggaaagaactaggagggggtcagaggcccccacctcagcatcctacaaaggccaggtgaccagccaaggagtgaaactcagccaaaaccgagggctgtttaggacacaccatctccatttctgcggccaatcctcagtcatctctactttaggacgtttgagatcctgtcgctggccggaatcagatgcacctggcagctctgggagctgtcgctacagggatgacttcagacagggtaagggggtcactcaggaaacaaggctctggagttataaaagtgatgggcaaatgccccagggctctgccaggcagggcccaggctgtgcagcattcccagatcttccttatctccatccctgtgtgtttttaccttggcctgtgcccagccactaagggggcatggaggaaaacaagacaggtgaggctctgggcaggtgtgtgctggccagtgcctcaccctccggccgtatgtccttcactctctccagcctctgcccccatattgatcctaagcctcaggaagcgaagcaagacggaatctcagctgagaaccttgtctgaagtgttgaaaacacggaagatcatcaagaattccctctctggttcatgtgaaaaaggtgtgttttgtatgaaaacaggcacagggtgctaaatcactcaggtcggtgctggatgaaaaagctaaatatcctgctagcaaatgccacacaggaattccttcttctacaccaaggggaacaatatccacacagccaagagaggaaaaaagctaccccgtatctaagggcagaagagatgtcttcctaaagaactaggagatatatttgtaacatacacatcagagggctgattccctccatgtgcaaagaactcatagaaatgaaaccaggtgatcttggttgttctcaaaagtagtgttctccacagttacagagtgggctgagttaagacccgggtcaaagtgtgctgctcggtgctgactttctcaaactggggatcatatgcagacatctccaggtttgggcaaattaaatgagctatgaatctgaagtgcttgtggtgcgtgagttataagtagctggggttattaacacttctcagttagaaccaggttgtaaggttaacaccaaggcgttgcctggcacacgagaggtgggctgctggagggagatgcagaggtctgtggactccgggagccagaggggagcaggaggactccatgggggagggagaaatacaggctcagccaggctggccctctcctgcgggaagtgtgactgagccaccaaaaggaccaagtcatgctgtaagaagactctcatcttccaagagccattgtgccgaggctggcgtccagcagagctcaccttctgtgagagcacctgccgctcaggtcacactgcaaagtcagctttagacaactcagggctgaggaaacctgtcagctccagatccggaactttgtgccacttttcttgctgcctccaacgtgcattactgctgcccaaatcggctccacgaaccattactgctgacacccttccctaggtgaaagttggttttaaacagtgcacctactttcacatcaaggttacaatttaactgtgtgtctgaataaactcttccagcctggcctctgtctcaccccttatttcttctccagtccagtataaatcttggacttgcggggaataaactgtcttttcatcctacgctgtcaagtggacttgaagttcggacttttgctagaaaagcagagatagagagttgacatgagggaacttgctactagcctctaacttgccctgtccttgaactgccctcaaatggactcaaacttagcaacctgttttgctagaagcgacgtctcggaaggctgaagccctgatggcgccgtgcaaccgagtggggaacgaatgcatggctgtcacaagaggtctgtgaggtcttcattcttcattcgtgcctcctggcatcacacgtctggcctcctgggaacaggtgggaaggtgctgctgagataatcaggtttttcatcatttgtctaaagagagccatggttgaacttctcactaatccttccctgcaaagctacagaagagactctttcttcctccaactgagattctcacccaggggcaaggagccttgtctgagccatgcaaaggcggatgagcacagctgccctctgcctaggaccaccaccccctggcagcacccgctagctggcagagaatccatcagcaccccagctctggagacgtcaaaacaaccaagaaacaaatagcattctctaccccaacagaagtgcgccggcatacggcagcactgcccccgccagaaagacaactgcttcggaccagtgcagctggagcccctgaccaatgccctggggtggggcatctgatgcagatgtcagcagagcatccactgggagcccaccctgcctgcccacaccactactcagcactggcctgatggtcactcatgacctgaagggtccagcatcctcagcaccttcaatctcaaaaaccagcgtgacagaccagatgcagacggagctggtgctgtcctcagtgccaactctgtggcatttcaaggggagcaaacaggacgcagggaaacccggtcatggaaagctgagctgcagcacagccacgctcaccgtgtgaggatggcatttatgaatgtgccgctgaaaaaacaaccaaaacttttacttaatattttaaactacaccttcttccaaaattaatttgaagcatttaaaatacccaatataataagaccatctgaacaataagcttttaaaaatccccaaagatagaggggaaattaaatactcaaaaacttcaagttaattaacagagatgctgtgactgagtctagtctgcagcttcctggcagctaaggtacacagaggatgaggcaagtgttactgtcaaagttgggattttaatatcttgccacttactttgcaaccagtgaagcacataagagcattaaaatcacaaggaacaacagtgcttaaaaataacaggcatcatgttcacacatccaaaaccacaaacaaaaccaaaaacaaatgcactattatttctacaggaggtcctcccaggactcaagccctaacaaaagctacagacactgcatgagacggcccacggtggccaccacaaaaggctaaggggaagaagatctggatcagggaagtccagaaacagataccaatcacccaaaaaatgagcaacgagagaaaacagaggaatgttttcatctaacctaaccgcattgcacaaatgaagtaccaaagcatactttgtgtacttttttcatttataaaattgtaaacttaaccctctccaatccaaactcttctgtccatccttttcccttttctctccctcgggtggaagagagctctgtgttttcttcccataaaagacaccatttgcaggtgtggactgagccgaccttgcagcccaaactgccctcttccatcttcttccaaggccagatgggttccaagtttcagaggtgctcgatttctgaacgctaatcccgagcacagacccctgctacctaagaccctaatcacatgcatcaatactctgggtgcatcaatatgctgggtgcatgtaacattagcacttggggaggctgaggcaggaggatcacttgagcccaggagtttgagaccagcctaggcaatgtggcgagaccccatctctacaaaaaatgcaaaaatgagcaaggtgtggtggtgtgtacccgcagtcccaactacgtgggagtatcaactgagtttgtgaggcagaggtcacagtgagctgggatcatgccactgcactccagcctgggtgacagagtgataccccatctaaaaaaagaaaaaaaaaaaagagaagaaaaaaatgcattaacgtttctgtggcaaagagtgggataaattgtttatcaatttatgtccattcataaagtttccatgacattcacttgcatcgaattaaaaaaaaaatttatttttgggaactccttcgtttttaaaaaaatacttactgaataagacctcaaaagcacaggccacaaaagcaaaaataagcaaataggattataaataacttaaaagcttctgcacagcaaaggaaacaaagtgaaaaaacaacctacagaataaaagaatacatttgcaaactactcaccagacaggggattaatattcaggatatataaggaactcaaacaactcaacagcaaagaaaaacccaaaaaacaaaaagaaaactgattaaaaaatgggcaaatgatccagacatttctcaaaagaaataaatgtccagaaaatacatgaaaaatgctcaacatcacaaatcatcagagaagtggaagtcttttttttttcttaagtgaaagcaagtctattaggaaaataaagaaataaaagaatggctactccacaggcagagcagcagcaaggacggctcagctgcttatacttattgttactagggaggcaaaagtcaaaactacaatgagatatcatctcattccagttagatggctattattggccgggcgcggtggcttacgcctgtaatcccagcactttgggaggccgaggtgggtggatcacgaggtcaggagattgacaccatcttggctaacacagtgaaaccccgtctctattaaaaataccaaaaattagccgggtgcggtggcgggcgcctgtaatcccagctactcaggaggctgaggcaggagaatggcatgaacccgggaggcggagcttgcagtgagccgagatagcgccactgcagtcccacctgggcgaaagaacgagactccatctcaaaaaaaaaaaaaaaaaaaaaaaaaaaaaaaaaaaaaaaaaaaaaaaaaaaaaaaaaaagaaggctattatcaaaaagacaaaaaatatcaaatgctggtgaggatacagagagaagggaactcttatacactgttggtaggaatgtaaactaatacagccactatggagagcagtatgaaggctccttaaaacacacatacccttgggaggccgaggtgggctgatcacaaggtcaggagttcgagaccagcctggcctatatggtgaaaccccatctctactaaaaaaatacaaaaattagctagacgtgatgataagcattttttcatgtgttttttggctgcataaatgtcttcttttgagaagtgtctgttcatatccttcgcccactttttgatggggttgtttgactctttcttgtaaatttgtttaagttctttgtagattctggatattagccctttgtcaaatgggttgattgcaaaaattttctcccattctgtaggttgcctgtttgctctgatggtagtttcttttgctgtgcagaagctctttagtttaattagatcccatttgccaattctggcttttgttgccattgcttttggtgttttagacatgaagtccttgcccatgcctatgtcctgaatgatattgcctaggtttccttctagggtttttatggttttaggtctaacattaagtctttaatccatcttgaattaatttttgtataagctgtaatcagagaaatgcaaatcaaaaccacaatgagataccatctcacaccagttagaatggcaatcattaaaaagtcaggaaacaacaggtgctggagagggtatggagaaacagggacacttttacactgttggtgggactgtaaactagttcaaccattgtgaaagacattgtggcaattcctcaaggatctagaactagaaataccatttgacacagccatcccattactgggtatatacccaaaggattataaatcatgctgctataaagacacatccacacgtatgttcattgcggcactattcacaatagcaaagacttggaaccaacccaaatgcccatcaatgatagactggattaagaaaatgtggcacatatacaccatggaacactatgcagccataaaaaaggatgagttcatgttctttgtaggaacatggaggaaggtagaaaccatcattctcagcaaactatcacaaggacagaaaaccaaacacaacatgctctcactcataggtgggaattgaacaatgagaacacttggacacaggaaggggaacatcacacactgaggcctgttgtggggtggggggaggggggagggatagcattaggagatatacctaatgtaaatgacgagttaatgggtgcagcataccaacgtggcacatgtatacatatgtaacaaacctgcacgttgtgcacatgtaccctagaacttaaagtataataataaaaaaaaaattaactgggcgtagtggcctgtagtcccagctactcaggaggctgaggcaggagaatcacttgaaccggggaggcagaggttgcagtgagccgagatcatgccactgcactccagcctgggtaacagagtgagactgtctcaaaaacaaaacaaaacaaaacaaaaccaacccccccccaccccaccacatacacacacacacacacacacacacacacacacaccaaactacgaacagaactaccatacgatccaacaatcccactactgggcgcctatccaaaggaaatgaaatcatcagtgtactggagagacatttgcactcctctgtttactgcagcctgattcacaatacccaagatatgaatccacccaggagtccaacagcagatgaatggatatggaaggtgtggtatataacattgaataggattcagccataacagagaatgaaatcctgtcatctgcagcaagatggacggaagcgcaggacactaaataaagtgaaataagccaggaatagaaagttaaatactacacgttctcactcatatgtggaagctaaagaaagatgatttcatagaaatacaaagtagaacagtgcatactggaggctgggaagggagggatggggagagatttgttaaaggaaacaaaatcacagctggctgggaagaatacgttccagtgttctgtaccaccgcaggatgactataactaacagtaatttatcattcaaatagctaggaggaagataccaaacattcccaaagaaatgatgcacgctcccgatctaatatcccgatctgctaactacatgttatatgtattgaaacatataccctatgagttgcacaattatgtgttaattttataaaaagttaaaaatacactttttaggagtttcagatttaagaaaaattgagcaggatggtagagctcccacactgccctacaatatgccccagtctcagaatgcgcacatatccaacattagttagaattagtaagccaacagtgagacgatttaaatctatcctttactcagccttcctcatttccccctaatatccccttcctgtcccaggatcctacccaggattccacatgacaattggccgtcacgtctccctgagttcctatggactgtgacagtctctcagaaatgtccctgttttgctgaccttgacggttttgaggggactggtgaggtgttttgtaggctgccctttggttgggacttgtctaacattgttcatgggtagacacggatcacaggcattttggaaaagggctttagagatgagcgcccttcccatggcgtcatatcaaagcccccctgctcatcactgatggtgacctcgcacttagctgggtcacgtttgcaggttttccccgtcccttccacatgccctctctggaggcatcgctctgctcagcccatgccagagaggagagggtgtgtgctctcttcttggcttttgagatgcgacactgctggcctcatggagggcacagcctcctgcctctgggtgaccaagcccatgcctcaggcccattagcttgtgatgggcagccgtctgacagaggaggtctaatgaccgtggggctgcagcattctcccaggtggaatgagcacagagagctgatccatctgcacagaagtgtgcacagggcagagaagcaaggtgacaaggggactcctgaggatcttctgggctttgcttccagaccctccctgtcactgggctgcacctccacccaaccctccagttcctcaggcacctctctcctacttcaatcttcgcttgctgaaatggtccaacttggtttccgtcactttccaccatgaagtgtgactaatgtggatcaactttccctttttgagtaagactagaaagacttgaaaaataattatagatttgatatgtttatgagcatgtgtaaaaattttttcaaattaatttcaaaatgatagtaagcttgcaagaatgaaaacagtataaagaacacttctaacacccaggttcactgcttgttaatattatgttccatctgctttatactttgcactgcccaccccatcttacacaatgtgcacacacagttttttctgaaccatttgaggataagttaaatacatcaaggtaagtgtggatttcctgagaataggaatactatcttacagaacagttatcagtttcagtaattttaatattgatccaatatttaatctatagcctctcttccaattcttcccattactccagtaatgtccctacagctccgccttgagtgcagggctcaccctagcatcaggcttaatattttgttgtcatttctttggcttgccttaattgggaagatttccaaagtcttttttatcttcatgacgttgacatttttgaagaatagtgtccctgcctttaaaaaatatttaaaattatttaattcaaagtggatcaatgacataaatgtaagagataaaactgtagactgttaaaggaacagtcatgtgttggatatgtcatttatttcttggctaccacaccaaaagtatatgcagaaaacaaagaggataaactggacatcaaaattaaaagcttctgttcatcaaaggacacaatgaacagaatcagcggagtgaaaacgcaacccaggaaatgaaagcaagatttgcaaatcacatatctgttaaggggctaatatccagaatgtgtaagggactcttacaattcaatagccaaaaaaaactaaatgcaaaccaaacaaagaaaccactccagctaaaaagtgtggaaaaacttgaatagtcatttctctaaagaaggtatacaaatagccagtgagcaagagaagatgttcgacaagaccatcactaggaaaacgcacaccaaagccacaacgagataccatctcacacccattaggataactactctcaaaaaaatagaaaacacctactgttggtgagcacacggagaaaccagacccacgtgcactgctggcgggaaggtaaaacaatgcagcggctgtggaaaacagtatggcagttcctccagaaatataaatagaactaatgtatggttcagcaattccacttctgagtatatacccagaagaactgaaaccaggtcttgaacagtatctataaacccatgttcacagcagcccaaaggtggaagcaacccaagtgaacatcggcagacaatggatgagccaagtgtggtatatacgtacaaggaaatattattcaatcttaaaaaggaagattttgacacaatgctacaacatcgatcaaccttgaggacattatgctaggtaacatcagccagtcacgaaaagacaaataccacaggactcaacttacatgaggtacctacctagagtagtcaaattcatagacaaagtagaatggtgggtaccaggggccgagaaaagagggatggagagtagagatttaatgaggacaatattaagtgcgtggagaaaccagaaccaggagcagccctgcgtgtgtggagaaaccggaaaccaggcacggccctgagcgtgtggagaagccggaacccaggcgcggccctgagcgtgtggagaagccggaacccaggcgcggccctgagcgtgtggagaagccggaacccaggcgcggccctgagcgtgtggagaagccggaacccaggcgcggccctgagcgtgtggagaagccggaacccaggggcggccctgagcgtgtggagaagccggaacccaggggcggccctgagcgtgtggagaaaccggatccaggggcggccctgagcgtgtggagaaaccggaactcgctctaagcagccgggcaactccttctccacagaaaggacttgaaaagtatctttttattaaatcataaaagacatcttttattaaacagaaaaataagcttttctgtttatttcaacaaaagaactatcagtgtgtagtccctaaagccaaagagaagagcaagtttccagcaggagggtaggctcagcagcatccactggcactgagcgtggaacattagggtggggtcgtaggtggccttgccgggtgccaccagggaaccgtggagacatggggctttgtctctcatgagccagcaggagatgaacccagaccctctgaggtgttcagctgtcaggagagagggccgtggggtggccgcgggtgaaaagggtcaaaggagggtttttgtttttagacagcatttatcacgtcatgtttacatgcagagaaacgacttcagagacaaggaaacgctggtgatgtcagagggaggggatgctggtcagcccaagggccttaagcagacggtagatggttggggtctggggaaggtggagggggtcaggagaaaaggcagctgcagcgggtcacagtgggtgggaactgctcattcgctgcttgtctcatttaggagataaactgaggccctaaaaggtttaacgttacactgacacggcaaagtgaaagaagaaattagagaatgggatgtaaagactaaaaatattaatgagtttaaacatggacacagtctctctgggatatggatggtaattctaaaaaaggagagacaaaaatatggcaacaagcctgcctcttccatctcctgaaaacacaccttggaggggcaggacccgggagcccgcctctggtaaccgcgtcctcgcccgcttgcagggtggccacagtgctccatgactgctctcctttcacacacacacctggccaggggatgtctggagagtcgggaggcaagagaagtgggagcagtgcaaaccagacaccaggaggacggcaaagcctcgcaggagattgtgtccaaataccacaagtgacatggtgtgaaagtgaattcttttatttttcattcggttttcccactggttttcaagtagactgcaagttttcaagtagactgcaagttctatttaaggaattgtgaaagccctactgtcccttacccgatgatcatctcaagttgggttcatgcctgaagacagccagagcagaaataaaggaaaaactataaactaataagaaaaaaggcatttgcatgactacatacacataattgtatatccatgtaaaggtataactgtatcagataattgtactgagacttacagctggccagcattgtcccaagcacctgacgcataccaagaatcctcctaatgactctaggagtggcactgcttttgccatttcacaggcagagaaagtaaaatacaagaaggcaacgtgtgcaggatcacatggccagaaagtgatagatctgaggccagacaatgggtcctgagcttaatccaagcacctgttaaattcattgcagccaaaccaccctgaggctcagctctggtacccaagggacgggggagtgagggtgaggctcctgggtacactgctgggacagtcacctgaggatcatatgaaacactgagaagctggaggtaaaaagtacagtcatgtacttaacgacaaggcaacatcctgagaaatgagctgtcagtccattgtgtcatcacgcaaacaccacagagtggacctacacacactgggatggggtagcctcctacgctcctatgctgtatggtacggccaagtgctcccgggctgcacacctggacaacatgtgactacatacaattgtaatacaacaatatttgtgtatctaaacatagaaaaggcacagtaaaacatgctgtgaaaagataaaaaatggtgcacccatatagggaacttacccataaacagagcttgtaggacgggaagctgctctgggtgagtggtaagttcacacaaagggctacaacatcactgcacgtggctgtagactctgtaaacactgtacttgtaagctaagacatcacctcacacggctgtagattcgtaaacaccatactcgtgaggtcagacatcgcatgtgtctgtaggttcgtaaacaccgtacttgtgagctaagacaacactgcacgcgactgtagatttgtaaacaccgtacttgtaagctaagacatcaccgcacgcggctgtagacttcataaacactgtactcgtgagccaagacatcaccacacgtggcggtagattcttaaacactgtactcgtaagctaagacatcatccacgtgcggctgtagactttgtaaaaactactcgcgagctaagacatcactgcatgaggctgtagattgatcaacactgcacttgtgagctaagtcatcaccgcacgtggctgtagattcataaacactgtactcgtaagctacactaaatctataagaaaattcccttgttaaataaattaacctacatttactgtaactttctatgttgtaaattccttaaagctttttgactcacttataaaaacagattaaaacatattgtacagctgtacaaaaataatttatctttatatcaagttttctattaaaagttttttactttttttttttctttttttgagacagagttttgctcttgttgaccagactggagtgcagtggcgcgatcttggctcaccacaacctctgcttcccaggttcaagcgattctcctgcctcagcctccctagtagctgggattacaggcatgcgccaccacgcccggctgattttgtatttttagtagagacggggttcctccatgttggtcaggctggtctcgaactcccgacctcaggtgatctgcccgcctcagcctcccaaagtgctgggattataggcatgagccgccgcgcctggccgaaagttttttactttttaaacttttttttttgttataaactaatacacagacacacattaatctgggcctccacggggtcaggatcactgaaatcactggcttccacctccacatcttgtccaactggagggtctttagggcaatgacatgcacagagccgtcatcttctgtgggaaccatgctttctgctggattcctcctgaaggacctgctgaggctgtcttacagttaacttttttattgttaagtatagagaatatgctctaagataacgacattaaaggtaagtacataaaccggcttcacaggtgtctattatcacagtccagtattatgcacgtactgtgtatgatcctacatgctatacgtttatacaactggcagcagaggtttatactagcattgccacaaacacataacgcattgcattatgatggccacaacatcaataaactccatttcacaggaatttttcagcttcattacagtcttacggaaccactctcatttaggggacactgtcttggggaccactgtggtctgtcattgacagaaacagcactatgcagcacatgactaattcagcaaagggacacgagctccacagacagcccagctctcagtctgctaagaccacaggccatgatgaagggactaaagaccagctggagaactctggccccctcccagcaaatccttctcatgtacacatgtatgtatgcacacgaatgcacacacacacacacacacttccacatatatgcatgtgtgtatacttgtaacaactccacatacaaaatacaaggcaatactaagactcagtgtgcatgtgcacatgcaacacacacacaatactcacatagcccacacactagcacaaactcatctgcatgcacacacgtacacatgtaacatacttacacacacataaaacagtacactacactcacacatgcaaactcacacttgcacacacatgcacatgggagtgcacttgcattcttgcaaaccctcatatacttgtaccacatacaggcacccacccatgcaacacacacatgcacactcatacttgcatgtactcgtgtgcacaaatatctgctacatatttgtatgcacacacacgacacgtgcaaagccataaatgtgtacacatttgaaagtcacacaactgcaacatacttgcaacacactcatgacacatatatgcacgtgtctatacttgcagcacacactacactcatgcacatgcatgtgcagttgaaacacatgcagtattgcacacacgtacacttgtaacacacaacagcatatatacacaacacacttgcacaaactcatactctcatgcatatatgcacttatacttgtacccacatcacactcacccatgcaacacatgacacaggcaagctcgcacatgtacaaactcatattcacatgtgcagacactattcacacacttgcaaaacacacatgcatgtatgcacagcacactcacacatgcactgagacacacacacaaggacctgatcgggtgaaaggctcctgttaagctgtttgtctttgtctctatcttcactccctccattctgctgctaagtctcaagtttactgatgtacttctattctgtggcccctgctctcaggatcttgatacttgggctaaccaatgagtaggaattaatttagtatctatgcttttctggtaataccctttagttatgacttcaggttacaagcccggaggaagctaagaaagttttcattctaggactttacaccaatgtaatgttcttaagatgtaaaaaattgctaaaactgttcctttttcttttgagacaaggtcttgctccattgcccaggctggagtgcagcggtgtgatcatggcttactgtagcctctaactctcaggatcaagcagtcctcccacctcagctttttaagtagctaggactataggcacatgccaccacacctagttcatttttaaaaaatgttgtagagatggagtctcgctatgttgcccaggctgccctcaaacctcttgggctccagtgattctcctgccttggcctcccaaagcactgggattaccggtgtgagcccattcccagccttaaaaccgcatcttcaaatgcagacaaatatatatatatatatatatattatatttttttcctatctaaagtctgaaaaactcaagtattcatggaaagaccaaattggaagtcattgagagacttatgatttcattttaaatgaattacactgtaacaaatattttaaaattgaacagtcacttgcaaatagtctcaacacaatttcatcatttccttcctgcacatgtgggactgtaatctgttccagaagcagggagagtgtgtcccctcactctatgatgcagaaatgctctccatggtgacctgtcacagatgcaggcaggtcccacccaccatggctccaagaataaaaagggcatcagaaacaggggcagaaaaccaagcagaaatggctaatacccctgttcgacaactgactttcacaatggtggtcttcctctgtaggccgtctttcttgtgcgtgtgcacattcatattctctctcaaggaaattgcatgtgcataccaataagctaaccttctccagagtaattagacgataattgggcaggtgccttggagctcgcaagtgagtgtgccattaaagcaacaggaacagtaattaatcctgtgacagagcctaatgcagatcaagtgagaaaaccaccatcccatttttataggaagagtaacaagaaagaaataagatcagtgcttttagtggctctcatttcactgcctcccgactgctggccttggactgtcgactttctcaccctctgtggtcagcagccctgggccggtggatcagaagaggtgagtcctctgtcaccatccagctgccggagctcatagtgacagcatctgccccagtctggctcttcacagcattcctttactttgtcctcacaggtgcctgggaagactggctttactgcacctgttctgagcacccccagagctcctgctgaaatgtgattcccagggttggaggtggggcctaatggagaagtcggagtcatgcaggcagatccgtcatgatagatgcaggccttccctgggggtgagcaggttcttgctctaccagctcccgggagagccggtggctaaaaacagtctgtcccctcctcccaccacgtgatctctgcacttgtggcccctctttccctccaccatgagtgaagctccctgaagcctgaccagaggcagatgcaggcaccacacttcctgtacagcctgcagaactgtgtgccaaatacacttcttttctttataaatcaccagcctcaggtgttcctttacagaaatggaaacagactaaggcaagagggaaactgaggttacagagtgtaatacctcgtcccagaggagctgacttctgacctgtgtgacccagagccccctgccagtggctgcagcaccaggcatattacatgctggtaaaggttgaaagtgatgctggagattaaagctggatgacatttttacctaggaatatttaagggaggtttaaggaaggagagggctttggggctggcttggaggactggagaaaaggcccctggggccacactccttggaggtgggctgggggctgcggactgtgagtgggtggtgagggcatcggagagcaagactgggacgccgctgagattctctgcagtgggggggtaagggagaaggggcccagccagacggaggggaccacagacagacctggttagaaaggtcaaagagagaacatcgcggagaaaaaaacagaaaggaatgagaagagtgagagcagccccagaagccgggagggaagggcagcgtggtgtcccacccgagggcacgggagaaagagcggcacacggtccatctggagggcagcagggagggttcaggggtgcctgggcggggcccggcacacagtccatctggagggcagcagggagggttcaggggtgcctgggcggggcccggcacacggtccctctggagggcagcagggaggctttgggggtgcctgggcggggcccggcacacggtccatctggagggcagcagggaggctttgggggtgcctgggcggggcccagcacatggtccatctggagggcagcagggagggttcaggggtgcctgggcggggcccagcacacggtccatctggagggcagcagggaggctttgggggtgcctgggcggggcccggtgaaaggaagtcactttacagccagactttgctttccttctttgtatgtaaaatgccaggtctgagtctcatgaagatgtctggcatccgaggagctcccctcggcactgctcaagggtgagagcctaggccagctagcagcgacggtcagcggcgtgggtgccgaccagaggcatgcagtggtgtgtgggaaagtgaactgcaccgccagctcctgttcctatgtactctcacttccatttcagatgctttccaaagcagctagcagcctagtcagggaaaaggttacgctttgagggccaggccacagacagaactgcatacatgtgttattgatgagctactgctcactccttcaggaagttatataattatgagttattttccaaagaattcttatggggagtcaggtgaatttgttttaatgcccagaagtgattatttagaaaactgtatgcccagaaacaagttacctaatctaaaactacatttctgatttttctaagtgttccagactgaactttgtccctggcagctggtggccttgggggcaggcgttgcctctggccctcagcctgcagggcctcctgagggctcctacgtggccaccactcttctgtgattttataactgtgcagccagtggttctgtcgaccagagggcctgatggaagagccacagggccaggcatgcatctacgagtgtgaaccgtcagggcgggcgtggctcctggccctggcgtgtgagctctcagccactggccgtcccatgcaggctgttgggacacccctggtctccccccaccagatgccagctgagccactgcccaacttgtgctgatcgaaaatgcctccaggcatgtcagacatccctgggggcacaggcacacacagcaacaggtcacggagcggctgctgacggcgataagggaaggcaccatgtcccacgcacttcacctaagcaacaatgaacgggcacctctacagtcaccaagtggaagatgatctgtttcaacgggggaagtctgcagtaaaaatgacgccttctttccttcctctctggcatcttagtgggtcctccttggcgggcagagattcctctaaagggcttctcatcctgctcaaccccatgcctgctttctggagtcctcacactctcaccaagaactccacttttcttctcagggggcgcttaggaggccacatagagaaggtaacctgacccctaacccctatttcaagcatcttgacaaaacatttccattcatgtaaagaaatgtgggcaggatgctgacattctacgacgggggcaaaatggtgcataaaataggaaggaaaagaaccgagtgcctgccttccagtgagatggtcagataaagcagctctggccatactcctgctatcacacctgccactgctgtcctgcaacagagtttcttttttttttttttttgagacgggatctcactctgtcacccaggctggaatgcagaggtgcaatctcagctcactgtaacctctgcctcccagtttcaagcaattctcctgactcagcctcccaaagagctgggatgacaagtgcccgccaccaaacctgggtaatttttagtggagacggggctttaccatgttgcccaggctggtctcgaactcctgacctcaggtgatccgcctacctcagcctcccaaatacctgggattacaggcgtgagccaccatgcctggccagagttttcaattgcaaagttcaagccaatgcctaactccaccacttcactcatgagacagttacactctgggcagataaacatcgtgtgcacctcttcttctagatggagacctgcatgcaaggccgcagaacaaaacaaaaaaaggaaaaaaagaaaaaacccagaagtgtacagtacctgtcgtgtctcagggctctcatgtccacgtagacagtggttgggtcaggtcctgaggttccctgcaagcaacaacagagtggttaactcaagtttacatggagggagattggggtctgtgcttctactagttaggaaacatttcttttgtaaaatcttaaagtgaaaaataaaactaaaaacacttagaccagcaacctctcaaggcacctgctaactttcagtgtgataacctaaattccagaaggaatatcttattaggataatactggattcacacagcttgaccgccaatatataaaaataggaaagaaaggagacaaagccacgcactgtgccaaaaaaaggaaggctgaaaactgccaagacggcgctgcaaaagcaggttggaaggatatgaagcatctgtgcggagaaatttttaccacatgcatccacctttaacaaaaggtgtattttgagggcccaggacagtgaagcagatgtgtgatatggatggacaggccagggaggaagaggtgaggggagcatcttgctcctccgggctctgctggggctctggctctctggcctgaggagggcatttccggccaagacacaggtcagggaaggggcattttatcctggagagctgggcaggactttgtggtctgagccattccactgggctgttgattttacacaggggtccagaaatcttttcttggcaccataaattgcttgaaaaattacaccatgctgacttctgaccagtgacctctgtacacagaagagcagcatcacgaaggctgcattacaaaccaaaattgtacactcatttttggggaaggcagtacaataccttggttggaaaaagactaaacctacaataaatttgccaaaaaataagggagcccttcagaattcatttgaagaattacactaaaattcttcaggagagaattccaatttttgtactaaaggcacaaaattttcttatattgcttatatataagaaaaaaaaaagacaatgtcatgaaaacataccatagtactcaataaccctgggccctggtatctcaccactgagacagggaaaaagaacagcacatgcgagtcagcctcccggcggacgctcccagtgacagctctacccccggctgctcagcaaagccgccccacagaccagcgctgagcagagaaccggcccacagtgagtaatgcaaaatacagccatggagggtcaattaaaaataagtaaatggaaaacaggtgaagaattaagtacaacagagatgaaccaaactggcaaatgaaccactgaccgcgcaccccgggaagacagcgtcggctacgcgtgaggcctgaacgtgacattgcccggccggcagcacccatgatcacagggcctgcagacccccggccaatctctgcactcaactgctagtctgtcccacggctggatgcgggcaaggcagcggggctgggcagggaggcacgggtgtgatggacaggaaagtcccctacctgctcggccagggtccacagcctgtgaggctacagcagcagaagggtgaggacgagaagagaggagagaacaccagacaacagaaaccaacacacacaacacacacagacacatacgacccgacagtgaaaaatgggatggagaagagggaggggtggggaggagaatgcgaaaagcaggaaacaaaatgaaaagaagatcaaaaacaacatcaaatatggaaatcattaaaattaaccactgtacaaggctaaaagaaatgttttaaagatgtcaacatatccacggagcaacagaagagggtgtagcaggtgactaaccacggcgcagggacacagaaggtaaatggtggcactgcaccgtgtcactcacggtgctctttctttctgagggacgcgggagtgcaagtttcatttgctaaatctgttgaggtagttccaaggttctgattccaggaacaaaggagagcctgtgagcttttacacctgcaagtagggcactagctctatccacctacacaatgaggcaaagggagaggccaacatgcatctgaagcctgaaagaatccagcgctgggctctcacacggtctgctcggcagcctcaggaggagtttccaccccagcaaatgtgctctgttgctgttccccaaacagagacaccaacttctgttttcttctcctcctcgtcatccatggctgtggtccctgcctgctacccgcattaaataatctaccccagctgctggacaattccagaaatcaacttgggcaagctccttggatgcaaggtatttttccctatgtcacttagctgtctttcccaaatattcccaaaaagtacaaagagtagaagatttttcacaggcgcctggactgatgcacacctgtgctttgtgtgtacggcccggcacccacccacaaccccatgacggcaacaggcagacactagagacagcagctgcagcagtggaaacggagttaagtggttttcttcaggctcaaatttggtcacaaagcccaatggaaaaactgccaccactcacaacagagccaagtctatgaaaataagcaatggttcaagattttaaaagaaaatcacgattccactcttctctgttacttctctagggtaattatggctactcttctctctcagcacccttatgtttgaaaaagagaggcagagcatgaataaataaagtaactcgccaataaaggtgtgtatgctccaaacacatagtggacctttactgaatatatttgagctgaatgcaatgatttaaataatttctttccttcatgattccttgaaacctaaatattaactggaacaaaaataaaaataagtcaacattctctctaaattatcctagttcagaaattgttataatgggtcaaggtggtatctcaggaaaaaatgtacacggctaagtacctcatttcctatcttgtaccacgtggaggaggcaacacagcacctgaagccaagtaggcctaagcattaatagagaagaatacatgaaggagataaagaggtaagatatagctgcttccaaattataaaacccctgaggtaaaaagtctgaaatttcaagatacatattgagggagtatttaacaaaatcttcatattgccaaagaatgctagccagtgttcccttaaatacggagatccctaatgcaaaagagtgcccctcagtatttaaggatcaaatacttgcaataaaggacccacagacaaacagcattaacccattccaactaaagctcattcagaaacaaagataaagcatttttgaaattccaagttatatgaacgagaaaaaaggattcacattaaaatccagttatataataaaaatgttaagcagtcagccttccatatctgtgagtttcgcatgtttagatttaaccaaccttgaatcccaaatattcgaaaaaactgcacctgaacaggcacagacttgttgtcataattctctgaatgatacagtacaactatttacacagcatttacatcgtattcggcatcacaagtcattagagatgatttaaagtacacggaggatgtgcatgggttctatgcaaatgctgcgccattttccagcagggacctgagcatctgcagacttaggtatccacagggagtctggaaacctgtcccccattgagggacaaatgtatataccaaaaaataactttcttactgacacagaagtattatatcaattaggtattaagtgcttattgaacaaatgagttatatttaaatctcaggtgaagatatacagactcacaccccaaatatcagcacagaaaacacaaaacagcactaattttagcatttaagctgactggtgattttactattcagcaattcacacaccataatattagcacaacctggtacttgcacatagggctatagtaaatagaaatgtgtgaaagaacgaacaaactccaaagacctgatactgggcttatgtagtacactaggtaagtctgagaagacgagaaaaggtttgggttgtatgtctccaggcaaatgacactcttcaaatggaaaggaaaatgacacaaaatttgactacttctttgtactcctatttccagaagaatttttatatttgcattaaaatctgggggctgtggaaatgttaccggcttagagaagccttaatgatgtactcccagtgatcttttcaaaaccagtagctaaatatgacaggtccctgccttaagccctgtaacaatttcccactgatcttgggaaaaggaccagtgcttggtgcagccctccgtcgtcctccctttctagccaccctggcctcttcccatctttcctgacccctctgaagttgcaggggcttcagctcagcttccagagtgctcttccctccccggtctcgtcaccgctaactcatctttctaaactcggcaccagccaggatttccttaaagaagcctgagagggaggttggccctccctgtgctgcaccggatcacccagcagctggacgccgtccttcccatggtctgtggccagtgcctgcctctcctgcacatgggaaggcatcaggacgaggctgggtctggcgatacgagtccctctgtgctcgtctgctccgcctgctgtgaaataccttagactaggtaacggctactcacagctctggagtctagcaagtcccagattgaggcacctgcagagtggatgaacatgttcctttaggcctcttttataagggtggaagtcccattcgtgagggctccaccctcatgatctaatcaccttctaaaggcctcatgtcttatactactgcattagggattatagttcaacacagaagttttggagggggacacagacattctgacctcagcaatcacatcatccacagttcatttacttttcacgtccttattggtgcgattgctgttggttctttacttgtccctttctttgttcctcccttcctgcctccttttctcatgaatagaatatttgtggtatttcactttaccctctgtgtattttttgaatgatttattgcattctatcttcacacagtgttatgtgctatgaaaatgaagattcttgcagcagtgcatttccggggcccaacttcctgttgtctcatctgttattcctacacatgctacgaacacctcagctgttcatatttttaaacagttaatacttttaaaacaaactaaaaatatttacatgtctacatattgacagattctaaaacgttttcttgtatttactcttttcagtattcttcatttcttcttaaaaatttgggcttcattttgctatcatttattttcatccttgagacattcttactatttcttgtgacacgtatttgctgaacgattctctaggttggctaagtatctgcttttctcttccattctgaaggatctcctgcagaagaaacagctctttcagcagcctgcatgcaccactccactgtattctggcttccagcacttctgatgagaactcagtgttgtttttattacttccccctacttagttttatttctgcagggactttaagattgactctgccactgactttcggtgtttggacaacaaagcatctgggtgtgattcttctcatttactctgcctggagttgactgagcttcttgaatctttgtgttgattcttcccttcactcctggccataggtcttcaaattgttctcttgccccattttctctcaccgctccttctggggctccgatcactacaggtatgttagacccacgggcctcagacactctgttccactgtattttcatgccttttctccttgttttatgcttaggtcatttctattggtcagacttcaagttcattcaatgagtctttcctctgctgtatctagtctcctattaaaccatgggaattttatttctaatactagttttcatttccagcatttccattttgttttttctcatagtttttatctttctgcaataccccccacctcttcatagatgttgtacaccttttcaacgaatttctggcctcacctatcacagctatttcgaagtctctgataattgcagcatgtctcttctactgactctttctagggccatctcctctcatgaacatgagtccatttctcttgcttctttgcaggtcttttaaattttgattatataacacaatgttttatgaaaaacgaagattgtatttaaaagaacagtaaagattaaataacatttacccccagaaaagaatttacaagcctatgggcaggatccggatgctgggcctgaacactgacactggatgtcttctatgcttcacggcgagagatctgctttccaaacagtaggagaccttccacccactttaggtaactgggtgattctctcttcagtctcacccccagcttcctctattccactgccacactcccagcctttggaaggcaaatacgttacacatggtgaagggcaagggcgctgcagagggatgtgctatgccctcatcccacctccattgttgaagtgtgagtggagttcccacggtgatttgggctgccctggagggtagccagggctctgctgggtgatccaggccaccctcgagcgggagccagcggctttcctgctcacctcccagccctcaggagcccctgccttttgcacactaaaggttcagagtgcctcagagaaaatgcatccacttttaggactcccctgggattctcatctaccttgcaaataacatactgccatttatgttttttaaaaagttcagaaactttttgctttatcattttttatggtaaattctttctcctggctcctctgccatgggaaaaaccacatacaggtctcttttctcctaggaagaaatgtaattcatctacatttgagtcttcagctctctgatggatcttagaaacgatgagtctgtgtattaaccagattgttccgacggttatggttggaacaagagtctcttgtgacttctacatctcaataaaaaatggaattccaaaatatttaaaaaataaatttgcaaaaatcacattgagcttgtttctatggttggcatcaaatggatggatctgtatgttgtcatcaggcattgatgcaggtgacaaactgtcaggaaatgggggttctggaatggattactggtggggtgggggccacagacagtgtgaactcagctcaggccgtctaccagcaagctggtcatcaggaccagccaaacactggctttcgtaaagtttgactgaagcacggcaatgcctgctcatttacatattgcctgtttctgctttgagtggcacagcagagctgagtagctgtgcggaaagcaccatgaggctggcagcctggacgccatgctctgacactttagagagagggcgtgggaaggctttagtttaggggctgccaagccacagagcagatgaaagcacccagacgtgacacggcacggctgtttttgttgaacttactgagtgaatgatgaactcagattcttgctttttggttcaagacatagactaaaagccaggcatgttctgtgactgcgatagagaatcccttgctgaaagccaggcgaacacttgaagctgtgcagttacacccctcagaccctcatcatgatctcctgggtccctaagactcttccagcggtgactccaacattcctggagacagatggaaagactcacttagcaccttgcagatccaacatgattatctgttcagtgcagtgtccatcagtgcctagggcacgtgagacatccaaaaacactggtagaattcgaatgttcctcttcttttctctctcttcatccctcaattgtaaattttacaattccatctgtagatcacagaatatcagtgatggaaccagagaaagaggaggcatcgcctaggaagtcgtgggtttgatgacggtcatggtaattccagaggcttcggcttgtctcccctttgcatgaagggcaagtgcctgagtagacgtaaaagcagcagctgcatcacggtggcttcctggggctatggagatgcgtaagggcaggacgagaacacagtgatgctggatggcgaaagggaggggtgggagcagccaccgctgccacactttggtcaccatacatctcaaccgtcctcctgtatcgggagaactcctccactttttgagtcctgtttgaatacagagcccttgtggctctgtaggaagtaaaaataccagaagtcccttcccagccttcctggaagctagggtgtggggagacgatcaaccagtcacatccatttacagcacaaaccaatcgggctcttgctgtcggcagtgaaggtgtccagacacgatccaggtttggggaatgccatgctggtggggaagtctcgtgtccaggaacaaggtcagcagtgcagacttcaaggtgtggtgtcctcacaagaacaagctgctgcacaagcggttcccataggcaggttcccaacgctggtcctactcccttggtggttctgagagccactcactggtgcctcaaactgccaaaggaggtttccattgcttacaggtcagaaagctggctgacgtgcaggatacctggaatatggtttccatgatccccagcgtggctgggatgccgtgtgtcagcaggaaagggcataaagttcctgctgacggtggctcattccctgaggctttcaaaatccccaacagcaccttatttatttccttcacctaaaagcagtgtagggggacaaggaaactgagagctcaagttaatgaaagtcttattattacaactatttattttgagaattaagatttacatcatctcctgagccttccacatttttcttttttttttttatacagagtctggctctgtttgctccgtcacccagactagagtacagtggcacgatctcggctcactgcaacctccacctcccaagttcaggcaattcccctgcctcagcctcccgagtagctgggattacagatgcgtgccaatgaaccgggctaatttttgaatttttagtacagacagggtcttactatgttgggcaagctggtctcgaacccctgacctcaaataatccacccgcctcagcctcctgaagtgctgggattacaggcgtgagccaccgcgcctggctcacttctttcaacaatccatgactccttctattactaggggggctgtatttctctttcattgtgtgagtttcaagatttaagggtcactgcaatagttactgttgatttaatcccacacaaagctacttataataaagctgccctctcagataaatcagttatttttctatataatagaaatccaagtttctgtttatgtttttttcctaataaataaacaaccgcggtctcttttggaaaacagaagacctcatgtttttcttccctgcttctactagaaggaggatgcaatttttctgttacagtgaacaatatctctaaatctaatgcaacaaaagaccttccagcttacatttttgaagagtaattgtggctgtgagaaatatatttccaaataataagtgacaccttctaataatactaagagaaatttatgtgaaagctaattaaacacagaagtcataatttgatctttctaatgtccacttttatcataaatttagtaaattgaaattcttttaaagtcatttttccagctaaaggtactgggaaatgttactcctaagagtaacaaatagcttttacttctaaattttgttctgtttttacctcctagctttgtcaattaggaaagttcacttctcagggccttcatctctcatcttaaaacaactaagaattcccttaaagagcatgggaagacctaactagatgctgtctgaatccaatggtccaatgcaatgactaaagaatgtatttttccagcgtgaatgactcttaaggtgcaagccccagacttcctatttgagaggaaaatgctgttagaaggttgaagaatagtaaaccctgggttttcatttgcaaggaacagttacagatggcatatgagcttttagctggtgaagattcacaccaggggttcattttgagaaaattcatcatgccaagtcattttccacgggagactagactctagtcaagtaaggatatgtttaatttctctaatgtgaattgtatttacacacacagattggcacttaaaagaatcaactttggcaggctgaggtgggaggatcacgaggtcaggagtttgagaccagcctggccaacatggcaaaatcctgtccctgctaaatatacaaaaattagctcggcgaggtggcaggtgcctgtaataccagctacttgggaggctgaggcaggagaatcacttgaacccaggaggcagaggttgcagtgagccgagatcatgccattacactccagcctggatgacaagagcaagactccgtctcaaaaaaaaaaaaaaaaatcaagtatcagtactttgacaaaatgtatccaacatccagaagtgactgtgatgatgtgagatggcactggacactcagggagggagattctttcataaagccatgctcttagctgagtgtggtggctcacgcctgtaatcccagtgctttgggaggctgaggtgggagggtcacttgaggccaggagttcaagaccagcctaggcaacatagtgagaccctgtctctacaaacactaacaacaacaaagaaaaaactgtgttctgtaaaacagctactcacagagcagaagcgacatggacatggtgataaataattaaaaagcagctggaaagtgtgaaggaggaggaacaaagtacactggcaattcagaggaaagagagcaccgcagctgacagagttcgagaaggccccatggaggggacccgggcggagcaggatgagggcagaggagagtccatccaggccgagcacagtgtccgggttatgaagcaggaaagactgcatgagaaagtggcttaggaacaactgcacgaaggggaggcagacgcttggggctggatggtgggaggaccagagtgccactgatagagccgatttttgcaaagtaaaaacaaacacccaatgtgtctctgtacacctgtaatgtttcctgtgtcaggtatgttctaaaaagtgcttgtccaggcgccaagtcagcactggaaaaactgcatgcggcttcgcccttgaggatgcagcactgctcaggagcaccggtgaggccttgaaatcctgcagtcataacactcatgaactgtgcagctcagccttccccgaagaccaggaccccctctgaccgtgatgcccttgacacatcctaagccctgctgcacacgggtgaggctccctctctcttttggacaatgttctttgctgagtttgctccctatctcctggagataaaactcttccctctctccatcaggcgtcccccaccagagtgcacagtcagggaaggcctgcgggggctccagcgagagaccggcgctgttagaacagtcagtcgggggtgcggggctccagcgagagaccggcgctgttagaacagtcagtcgggggtgcggggctccggcgagagaccggcgctgttagaacagtcagtcgggggtgcggggctccggcgagagaccggcgctgttagaacagtcagtcgggggtgcggggctccggcgagagaccggcgctgttagaacagtcagtcgggggtgcggggctccggcgagagaccggcgctgttagaacagtcagtcgggggtgcggggctccggcgagagaccggcgctgttagaacagtcagtcgggggtgcggggctccggcgagagaccggcgctgttagaacagtccgtcgggggtgcggggctccggcgagagaccggcgctgttagaacagtccgtcgggggtgcggggctccggcgagagaccggcgctgttagaacagtccgtcgggggtgcggggctccggcgagagaccggcgctgttagaacagtccgtcgggggtgcggggctccggcgagagaccggcgctgttagaacagtccgtcgggggtgcggggctccggcgagagaccggcgctgttagaacagtccgtcgggggtgcggggctccggcgagagaccggcgctgttagaacagtccgtcgggggtgcggggctccggcgagagaccggcgctgttagaacagtccgtcgggggtgcggggctccggcgagagaccggcgctgttagaacagtccgtcgggggtgcggggctccggcgagagaccggcgctgttagaacagtcagtcgggggtgcggggctccggcgagagaccagtgttgttagaacagtcagtcgggggtgcggggctccggcgagagaccggcgctgttagaacagtcagtcgggggtgcgggggtccggcgagagaccggcgctgttagaacagtcagtcgggggtgcggggctccggcgagagaccagtgttgttagaacagtcagtcgggggtgcggggctccggcgagagaccggcgctgttagaacagtccgtcgggggtgcggggctccggcgagagaccggcgctgttagaacagtcagtcgggggtgcggggctccggcgagagaccagtgttgttagaacagtcagtcgggggtgcggggctccagcgagagaccggcgctgttagaacagtcagtcgggggtgcggggctccggcgagagaccagtgttgttagaacagtcagtcgggggtgcggggctccggcgagagaccggcgctgttagaacagtcagtcgggggtgcggggctccggcgagagaccggcgctgttagaacagtcagtcgggggtgcggggctccggcgagagaccagtgttgttagaacagtcagtcgggggtgcggggctccagtgagagaccggcgctgttagaacagtcagtcgggggtgcggggctccggcgagagaccagtgttgttagaacagtcagtcgggggtgcggggctccggcgagagaccggcgctgttagaacagtcagtcgggggtgcggggctccggcgagagaccggcgctgttagaacagtcagtcgggggtgcggggctccagtgagagaccagtgttgttagaacagtcagtcgggggtgcgggggtccggcgagagaccggcgttgttagaacagtcagtcgggggtgcggggctccggcgagagaccggcgttgttagaacagtcagtcgggggtgcggggctccagcgagagaccggcgctgttagaacagtcagtcgggggtgcggggctccagcgagagaccggcgctgttagaacagtcagtcgggggtgcggggctccggcgagagaccggcgctgttagaacagtcagtcgggggtgcggggctccagcgagagaccagcgttgttagaacgcagtcagtctgagagcagacacccccgtttccacactcactcacgatgctgctgcttcaaactgaaagctacatttttcaacatctttaaatatttaggtacaaggtttggaattctggcagtgtcttaattttttgtgtttttgattttttacatcaaatgattaattgtgattatctcagggtagatgggtttatgactgttatttataagctaaagtgtattttctgattttgttttctaaaatattcttttataaagaaaaataaattcaatgtatagaaaattcagaaacatttcaggctttccttattaggactcatgagcagtgtggtccgtacatttaatgtaccaggcatgtcctgtgtgctgggctctatggagagccagggagcgagaggtggtttctgccgctggatcctgggcttctccactctgcttgtttctatcaccatcaggtttttttaattttgcagattctagaaaatgagtgtttccaaagaccagctctgcctgtagcctctgcacttacggctgccttcgctggactctcgcccgcacgactccgccctttcactgtgctctgctgaagcgttcctgactgccctcccccagaacgcctccccgtgttcgtggcactctatcctctcactgctcgcttttactaaaatgagtcacttcctgaaaaaattatctacatgcctaccgtccaactcactgactgtgagaaatgtttgatgatggcacaaactttgtcataagtttctttgtagtaaaatttgacataggctgacatgagccccttcaagtctggggcccccacccttccttgctgcaggaacactggcacatgtgatactgagctgtggcatcatgcatggcatctgtgccacatcacctctcacaaagccagaaacctaattccgaagcacacctgccctcaaagattctgggaaggggaggtgagctcgcattgctttgtacataaatttaatttctctctgctggtagacacttggatacttccaactattttccaatactatgcagacaaggaaatgctgaccgaaaggagttagggataggtcaagtagaaaactgaacatggacaaaaatgcttaaagatgctgccaagattgcaaaataacgccatgacccatgattagaatactgaattttgatttagcggtcatattgacagaattgtcttctgcacaagaacatattgccatttcctattaagaatacagaaccgtgctcaacactcccacggcgcacattcattcaatatccaccacgtgtcaggccccgccctggtgccgaggtaaggacggtggcacgcttcagaagccttgtggaaaacaccagcacgccaactctgttcttcattctgtccctttcctgcgctgtttttctttcatctccatgttttggttcttttttcacgtattttatcttctcctactgagcgtactccttccttgtaaaccatcttaaaacattttggggctgggcgtggtggctcatgcctgtaatcccagcactttaggaggcaaaggaaggcggatcatgaggtcaggagatcaaaaccatgctggctaacacggtgaaaccccatctctactaaaaatacaaaaaattagctgcgcttggtggcgagcacctgtagtcccagatgctggggaagctgaggcaggagaatggcgtgaacccagcaggtggagcttgcagtgagcccagatcacggcaatgcactccagcctgggcaacagagtgatactccatctcaaaaacaaacaaacaaaaaaaaaacattttggatccaggtggatggaaataaatgaaaaagtaaagaggaaaataaatgtatgtactctacaagaggccaattttacaccacacgctgaactctgtcacctgctggagggcacgatgcgacgggttactctctgctctctcccttcagcgccaccttgacattttaagagacaaagccagaagcagcagcctcgccatggccagtgccatctctcacaaatcactgatttcctcttgcccgggggtccctgtcactggtggatggagacaagtgagacatcacactattgctgaacttaagaagcagacttctgcatttcctatttctcctaatgggatagatggcgataaacatttatgaggaacagaaaaaggtgaataggcagagaaaacttcaatattttaagaactagtttggtgagataaatctaattcttcagatgacctcttagaaaagggtattattttaatcataggacaaggtttaactgactcttgagagaaatttggtaatttataatttcttaaagatggagctattataataattaaaagagaagcaagacagaagcaaggaacaccacgtttatgaaaattaaaaaaaaggccgggtgcagtggctcacgtctgtaatcccagcactttgggaggccagggcagacagattgttaagctgaggagttcaagaccagcctgggcgacatggtgaaaccccgtctccacaaaaaatttaaaaattagccaggcgtggtggtgtgcacctgtagtcccagccacgtgggaggctgaggtgggagggttgcttgagcctgggagcggggggcagggggttgaggctgcagtgagccatgacgccactgcactccagcctgggtgacagagtgataccctgtctcaaaaaagtaaaagaaaaatcaagaaaagctttttgcagctactttttctgaagtgatctcgggaagagaggaggttccctcctctgacctagtggctaactccaagcacctagacaggcgtgaaaagggcagagggagccttcggaggctcacccagcagcaaccttaagcaatcactctgggatcacaagtaggatagggggtggggagagggaggtggagggatgcacaccaaccgtttgcctcaccagcacctgctgagagggaagcccttattcttccaggaaggaaatccgcagctctgcctgcagcttgtcagccactgttaatgcaaggctgtcttgctagagctgcttcacttacgcctgtttcccagaagtgcggctttgcggtttctaaaatgccattgcagcagcaaatcccagaacctgctcaatgtcattaagttcttcctacagcgatcgtctacacgcgtgggactaagtacttcgagggactggtttcttcatctgtctagtatctaatctttaaaaagtcgaacagcagaggtctggacaaactgctacccctgtcacaaaagttaaaatgttccaggacagagtaagtcctatgaatgcttgttatgaataatggatacgaacgtagactgtagtttaaagaaacagagatctgcaccaaccgcatgcgtgtgactgaaagatctcttctggatgtagctaagcatcagccgagggagacgagtggagccagtctgtgctgtacccaccccgggagccacacttcccactcagcactgtgatgtcgccgaatctcacctgcaagcaaatcgccaggttcaccctgcaaccgaacgaggtgctgacggcccgcgggtgaaggcccaggtccttaaacagctttgagaacgactgtgtgagtgcgatccgaggcctctcttccgccacaaccacgcaggtcctcactcgggacaagtccagccctcgcgcctggagatgatgacagagaaaccgagtcagcccccacgtgtcgagcttggagtgagccagagactccttcccacagatccccacgtaaacattggaaaactcaacacagctatgcatttccagggccacctgtgtccacttcttcaatataacaaaccaggagttggtgaaaaaacattcacacaactattcaaatgattaagaatggaattacaaacacgtctcaaacaaccacctggagccacagcaagaactgttatgaggaaaaaggttgaggaaaagcaacttcctggctgagacgatgaaaggccgttcgggaaaagagagccatctgatacattcttctgggcatggatgtaccagaacacacactggagaggaacgggaaaaatctacatgtaaaagagatgggatcttgctatgctgcccaggctggagttgaactcctcggctcaagtgaccctcccaccttgtggtctcccaagtagctgggactgcagacatgtaccaccacacccagcctgaaaacctacattttaatatataggaatataaaactaaaatttttggatgacttcatagacagtgctccatttatgtcccattacgccaagaatttcttctcattctcaagcgtgtctgtttccacagtaagcaaaagattaacaacatctcagtttccacaccaaattcagtcagccgagcacaacagaaaaagtcatacaggaattcaaggagttaagctcagctcactctgtggcactacctgggccgagcagagggaaagtaagggagcgacaggaatggcttgtgaatgtgaaggcgagccgtgaatgtctgcgtcttggagtggaacccagagctgctaagggggcggccaccaaaaccccaaccgtcaggccctgcgaaccctttcaaggcagcctcggcacacggacaaccgacaagggtcctgagcaaggaggacgcacagctcgagctggctttgacattcgtgctcagtgtacagacacgactgtacacacagagttaaacaggaaaaactcaagtctgggtgacacaaattacatattcacacgcgcgcacgtctgagaggtaaagcagcatgcagctgcaacagcaggtctgaagccaaagattctaaatttggctccaggttcgttcagcctaagaacctggaaaggttgcttaatttctctatgacataagtttcctcagctttaaaatggagacaataagggctcctatttcagagagctattgtaaggatgaaatgaatacgtaaattgcatactgaccctcaactatgtcatgattttattctggttatttatatatgtgccaacaggaaggtcatgaaaatgtactcactttctaatacaatatagatgaacatgaatagtgctaactttttcctatataaaaacttaaaatgattgcacaattacttatgttacataaagttatcttgcattttgctttcctgtccaagctttatgcattaggaaaacaatgcaggacagataaatgtactgttccgttattgatctctgtgtagatgacagaaacacaaacacaatccatgtatatacaaagacatacacacatccaaagagtacaaagtcagttgaaattttatcaaaactggtcagatgattattccctcctagttacttggagctaaggactacttaatttaccatgaagatatacgtatcaaaatgtccttggtttaaatggagggaaatactattattcttacataatagcaattattaaaaaatgaaacacaacactgttaactgaactgtaaaatgaattgagcttagggtccagacccagaaatcagggtctccagggaaaataaaagtgagcggctaaattcaaacctaccttcttaaacaccagtatcaaataaagttaacatcacctaagatcttctgaacactgaacacttcagaacactgaatccacccaacaaaaaatcaaatttaggatctttcaagtagacccagtggaatgacaggcattgaaaatattttacattctggttcgttactgtctgtggtcgtggggaaatattcacgttaaaaagattttcatataaaggcagtttgtaagcttcaggtgacgttagattaaacccaggctttgttttggaggactgttttaacttcaccccatcacagatgtgccttcttagaaaggagtccctgtgggctcacagggcactgagctgccaagggagctgcttaccttgagggactctgtttgcgagcccagccccttggtgcacagctccatcacggagtaggagcaaaacgtgtctcggactttgtactgactcacggcaagaagccacaaggcggggttggtttccagctcagagggcgggatcaggatggactggtgcccagaatacacactgcagagaaagaagaggctgtcagggcgggagctcagcaaggctggagctcagcaaggctggagggctcagggcagcactgactccaaggaaaaggaggacttggaacagcccgtgctgccatctgtagaagggcacagtaaagccaacgctgcaaactgcaaccatgttcacgaaagccttctgaaaagcaaatacgtactacagaatcatggggcagttcctaccactttgaacacacatttaagactactaaacgctgtgatgctgtgatgtctctcagacctgcgacatcagcaaactggatcctctttcttagtagaaaacacagggatcaaatttcggtttaaaaaaaaaaagtccagcttcagaacaggagctggcaaaccacagacacttcctgtttttgtaaataaagttttattggaacagggccaccaccactcatttgtttaaatattgtctccagtggctttgagctgagtggtcagagaccacagaacctaaaatatttaccaaacagcaatttaataaagagcaggcctatacctggtttagaaaactgacagccagggtgaaaaaaagacaattatggtaattaaagttagtcactcaatctttttaagatcagatttttactaaaaaggatcccaacgaattaccaaacagaagaaatagagaaaaataacgattctttaattttaccttcatactagagaacagatttagagaaatgaaaaagtgatagattacatattttatcaattgatggggtaagtgtggatttaacaacttgtcaaaactacatttttaatggttttaattttgtttactactatgaattcacaatagataccatacattaaaataaaatatcctagataaatcacgttctaagatttacaatttaattaacgggaacgttctgttgcccaggctagagtagggtggtgtaatcatagctacctgtcacctcaaactcctgggctccagcaattctcctgcctctcctgagtcagtaggaccacaggtgtgcaccaccatgcttgttttttttttttttcagtggtagggtctatgttgcctaggctcatcttgaacttcggggctcaagcaatcctctcttgttcctgctgtggccatgtaagatgtgcctggcctcccaaagtgttgggattacaggcatgagccaccatgcccaacctacacaattttttttttttttttttgagacagggtctcactctgtcacccagactggagtgcagtggtgtgatctgggttcattataacctctgcctttcaagctgaggccatcctcccacctcagtccctgagtagctgggactacagatgcacaacactatgcctggctaattttttttttttttttttttgtagatacggtttcgtattgttgcccaggctggtctcaaactcctggcttcaagtactcctcctatcttagcctcccaaagtgctaggattataggcatgagctgccataagaggcctacgcaaaattttatcagtgaaacagcactatgattaacgagttaggccttgttaactactatgctataatactaaagccagttctttaatgtagccaatctcatctaaaaattttcataattgtttataagagaatccaactaaagaaatgtaaggaagttaggttggctaacaaaatttatttcaaacgggacccttagtatgaaaaactactcttcggcaaatgtgacaaaggcgtttttgggcaattttccatttctttcctcattcttattccaaagcttgatttattcttttcaaaaggacacatagccctctgtgtctgtgggttcctcacccctggcttcaaccatgaatcaaagatattcatgaaaaaatctgcatctatacctaacttgtagattttcttatcattagtgactaaacaacatagtacaactattcacacagcatttacattgtgttaggtattacaagtaatccagaaattatttaaaacatgagagaggaagtgcataggtgatgtgctcgtatgatgccattttatatcagggacttgagcatcctcgctctttgctttctgcagtggtcccggaacctatctcctccgtggacaccgagggacgactttctagcaaatagtgacctttccaagggtttaatactttgagaacagggttaggcacataaggggtgaatatcaggcctcgaatttttactctgctgtaaactggccatttcatcttagttttaaaaattttactgtggtaaaacatatgtaacataacatttaccatattaaccacttcttttctttttttctgagacagagtcttactttgtcacccaggctagagtgcagtggtgtgatcacagctcactgtagccctgacctcatgggctcaagtgatcctcccacttcccaagtatctgggactagaggcacgtaccaccatgactgggactagagactagaggcacataccaccatgactggctaacttaaaactttttttgtggagatggggtctcactatgttgcccaagctggtcttgaacgcctaggttcaagcaatcctcctgcctcggacacccaaagtcattttaaccatttctaagtgtccctggaagtggcttcctcaaaaatacacatcagcattaatgatttgctctgtcagaattgtcagcacacaacgggcttgggaacccagtgtgaattcctggccagagaatttcaaatatacttgtgaaaactaaatatagtttcacctccctcctcatcaccataaataagaaatcaacattaagaaaacacaaatcttgacagcagaaacaaatagaaaacccaactcatgatttcctaattgcccttacctcactcaatacagcaaattttgattaattgctgtattagccaaaattgatttttggcactggcaataaattctgctatggacaagacaaacctacttaagagcaggttgcttattctcaagacattattctctgagaatgttgggaacctgagctgttcttcagatcttaacttcaaaaagaataaaaatagacattttggtaagtaatacacattcgcacattagcaatttgatgatttcagattactaacctgacaaaatataccaacaactgaaaactctcctaacttgggaattcaacaagacaggttcatctcacctgggggtcctgggtcataccctgtctgccagcaggcatgccatccagcccagggtctccctacacacttgagttactgcaatgaagcactttattattttttattgttgagacagagtctcactccgtcgcccaggttggagtgcagtggtgcattcttggctcaatgcaacctctgcctcctgggttcaagtgattctcctgcctcatgctcctgagtagctgggatgacaggcgtgtgccaccacgccaggctaatttttgtatttttagcagagacgaggtttcatcatgttggccaggctggtctcaaactcctgacctcaagtgatccacccacctcagcctcccaaagtgctgggattacctgcatgagccaccgcacccggcctattctttttaaaacacccgtcggctttatttaggtatactttgcataccctaagtttcactcattttaagcacagaatggcttttaataaaattgaagagttgtaaaatggtcactactctagaacattcccatcacctgaaagggatcccgtgtccatctgcagtcagtcccatttccagccctagccccagtcatcattctactttgtttacaaatttgccttttctggacactgcctaccacacagccacacttccctccctcagcaggtgcttctgagctcatcctgtgcagaagcacccaccatgtggacgtggcaggcgtcacctgttcagtcacctgctagcggatacctggattgtttccttgtgttgaccgaggttccagggaacttacaccaagtctctgagtggatgttcgctttcctttctcctaggagtgcagctgctgagtcaatgcagcaagtctgcttaattaagatcatgccaaacagtggcttccccattttacattcccactatcaatgtatgagaattcgtttttccaccttcttggttactgttgctttgcagtgtaagttttgaagtcagaaaacacgagctctccaactttatttcctgtgttttcggtgacagcattctagtgggtgtgaagtggtatctcactgtggttttaatttgcatttccctaattaacgctaggtatcttttcacgtccttattggccatttgtatgtcttcttctggtgagatatctattcagatctcttgcccgtgtttatgttgcttgtttctgagttttgagtgtttattacataggctgggtgcagtggctcacgcctgtaatcccagcactttgggaggctgaagcgggcagattacttgaggtaaggagttcaagaccagcctggccaacatggcaaaacactgtctctactaaaaatacaaaaaaaatagccaggtgtggtggtgcatgcctgtacttccagctacttgggaggctgaggcaggagaatcacttgaaccttggaggcagaggtggcagtaagctgagatcaagctactgcactccagcccgggtgacagagcaagactgtctcaaaaaaaaaaaaaaaaaaaaagaaaaaatttattacataggtgcttagaagtgcttcatgagatttataatttgcaaatattttttcccagactgtggcttgtctttctacttaattctgtcttttgatatacaaaagttttaaattttgttccagtccagtttatcagtatttatgtagtatacctttgatgaactctgtgcctaaccaagattatgaaaatttactcctgtgttttctaaaatttttataatttttgctcttacattaagatctatgatccacttgaactaacttaggtatatgacgttgagtcaaggtttaatcttttttccttttcatgtgaatgtccgaatttcccagcatctgttgttggaaaaacttttcttcattgaattgctcgggtaactctattaaaaaattatttgaccataaatataagggtttatttctggactctcaattctgtttctcatatatataatcactctatctcaatgccagtacattgttctggttattgcagctttgcaatatttttgaaatcaggaatgagaagttctgaattctccaattttgttaacctattttaaaactgctttcactattgtgggtcctttatatttacttcaggatattatcaatttctgccccaaaaaacccccaaaaaatagcctgccaagattttggtaggaattacattgaacctataaagcaatgtggggagaactaccattttaataatattgaatcttccaatacatgaatacaggctatctgacacaatttttaaaaacaggtgtaatcttaaaaaatattttgaaacaataccattatactcatatgtctcagataaacaatcctctatgacagaagaaagctttaggatgaggacacaaattatttgtgttacttaactttcaaacaatcacaaagttatagaaaatgtacaagtacgtttaaaataattctctctccttggattatctaatggtgaatcactgacctgatgcgtaatcccagacacttcaggggggatttccaacaaacaagtctattttcctccataaacacctaagccatcaaaatcagaaaaccaacgcattcctcctgtcccagctcagaccctgttcaagtttctctagccatccccaattacccagtttgcacaggcacactgcaagaaagtggtcggctctcagcttcccgctgcccagagcgagtttctggatgtttccgtgactctcacgacaccaggctttgggaagattctaggcaggtgcattgtccaatcagtcccctaacttgggggctggtgcttccacatggggagatccaggacaggcatcttcggcaggagtatcgcggatgcggctctcttcatcccacccgctgtgtgctacaggcttcaccatcactgaggtttgcctggaccagctggttcaggcttttccaccatgaagactctctttcctttaactatttcgtggatggctactatagaaatcctcacttctcatcaagctttccatttgttcatctgtgtatctgaatagttggaaaatttcctattttactcaaagtgttacaacctgttgcaatctttattcttgagacagggtctcgctctgtcacccaggcttgagtgcagtggcgtgatctcagcttactgcaacctcaaccacccaggctcaagtgatcctccacctcagcctcccaagtagttgggaccacaggcgcacaccactacacccggctaactaaaaaaaaaatgtttttgtaggctaggtgtggtggttcatgcctataattccaacactttgggaggctgaggtgggaggatagcttgagcccaggagttcaaaaccagcctgggcaacatggcaagacgccatctctaaaaaaaaatttaaaaatcagcatccctgaggtcccaggatagcgatgctttggtcaaggatgggtccgtgtacaatggtggtctcatgagcctgtaacgaagctgaaaaatttctactgcctagagatgctgaagcacaccacgttacttgtgttggtggtggtaactggtctaaacaaacctgtgctgccagtcatataaaagcacagcacatacaatcatgtcttcagttctgtttacacgatgaatcacatttttttatttgcatatgatacctagcatcttagagatgaagcctacttgggcacggtggattaggtttttgatgagcatatacaattatgtacacaacttaatactttaaccatgatgacaaacaactgttactggtttatgaatttactgtactttgttattttacagcatcctcctacttataaaaaagaaagtaaattgtaaaacagcctcagtgggtccttcaggagggtcttccaggagaaggtattgttatcctaggagatcatggctccgtctgcgtcctgtccctgaaggccctccagtgggacaagaggtggaggggaaaacagtgacactgaacaccctggccctgtggaggcctaggcagctgtgtgtgtgtgtgttgtggaggcctagactggtgtgtgtgcgcgtgttgtggaggcctaggcaggtgtgtgtgtgtgtgtgtgtgtgtgttgtggaggcctagactggtgtgtgcgcgtgtgtgtgtgttgtggaggcctaggcagctgtgtgtgtgtgtgttgtggaggcctaggcagctgtgtgtgtgtgtgtgtgtgttgtggaggcctagactggtgtgtgtgtgtgtgtgtgtgtgttgtggaggcctagactggtgtgtgtgtgcgtgtgtgtgttgtggaggcctaggcagctgtgtgtgtgtgtgtgttgtggaggcctaggctgatgtgtgcatgcgtgtggtggaggcctaggcagctgtctgtgtgtgcaagtgtgtgtggtggaggcctaggccggtgtgtgtgtgttgtggaggcctaggctgatgtgtgtgtgtgttctgtggaggcctaggcagctgtgtgtgtgtgtgcacgtgtgttgtggaggcctaggcaggtgtgtgcgcgcgtgtgtgttgtggaggcctaggcagctgtgtgtgtgtcgtggaggcctacgtagctgtgtgtgtgtgttgtggaggcctaggctgattgtgtgtgcgtgtgtgttgtggaggcctaagctgatgtgtatgtgtgtgctgtggaggcctagacagtctgtgtgtgtgtgcgtgcgtgtgtgttgtagaggcctaggaagctgtgtgtgtgctgtggaggcctaggctgatgtgtgtgtgtgtgttctgtggaggcctaggcagctgtgtgtgtgtgcgcacgtgtgttgtggaggcgtaggccggtgtgtgtacgcgtgtgtgttgtggaggcctaggcagctgtgtgtgtgttgtggaggcctaggctgatgtgtgtgtgtgttgtggaggactaggctgatgtgtgtgtgtgttctgtgaaggcctaggcagctgtgtgtgtgcacgtgtgtcgtggaggcctacgcagctgtgtgtgtgtgttgtggaggcctaggttgatgtgtgtgcacgtgtgttgtagaggcctaggaagctgtgtgtgtgtgttgtggaggcctaggctgatgtgtatgtgtgtgctgtggaggcctagacagtcgtgtgtgtgtgtgcgtgtgtgtgtgttgtagaggcctaggaagctgtgtgtgtgctgtggaggcctaggctgatgtgtatgcgtgtatatattagtttttaacaaaagcttcaaatgttttttaaaatttaatagaaagcagcttataaaggagataaattatttttgtatagttgtataatgtgtttgtgttataagctaagtgtttttatagatgagtcaaaaatgttacaaattaaaacgttaaggttaaaaagttacagtaagcgaaggttaatttattactgaagaactaaaaatatttttgacaaacttggcgtagccaaagtgtctggtatttacagaggccacaatagtgtgcagtcgtgtcctggcctcacgttcaggtgccgcttactcaccaactcgccaactcacctgggcaacctccactcctgccagctccagtcatgggaaatgccctacacagtttttttttttttttcccaccttctataccatctttttactgtaccttttctgtgtttaaatatgtctcgacacacgaccacttaccatcacgttaccgctgcccacagcattcagtgcactaacacgctgcacaggactgcggactgggtgtgtcaggctgtaccagccaagtctgtgcaagcaaactccatgtttacataatgaaatcgcccatttggaacgtacccccatgactaacgcctggccgcactgatttctaattccccacacggagccgatctccctcggctgctgccgattcttagaacaagctctgactcccccacgctgcaccctgcctggctggcactgcccacgccacctgcacgctgcaccctgcctggctcccacagcccacgccacctgcacgctgcacgctgcaccctgcctggctcccacagcccaccccacctgcaccctgcaccctgcctggctcccacagcccacgccacctgcaccctgcaccctgcctggctcccacaatgcaccctgcctggctcccacagcccacgccaggacacccctctgtggactcccctcctccgacgtgggcttgggcaccctgcgcggctgcccccaccaagacacactccccaccctgctacactcttaggagcacagcctgaggtcgaggcgtcctcaaatttacacccccagggcctcttctgcctgattctcttcccagacctgctgaactgcatgggaaagggaagtcattattatttttaacttatgtattagtcattgtggatctaggacccaagtgctttttttgttttttaaaagcaagtccattgggatctgtttctatagagatttttttcttttttaatgggaagattcatggctatatttattttgactgttgcaagggcaatcaacagaatactgtgatcttgtgacttctgagttagtaacattttgcaggaaagatgcttgtcaaatttcatcgcaacctggacaaacccttaaagagtgtattgttattgtgggttcacacggagaacttactttccctgcaacaaacatcttctctctggtttccatggggagccaggcttggtaagcctgcaggcaggaggcttccatcggctggcttcagttttactggtatactttgccaaatgaaatacggtcaccctacaagggccgttgttcagaacagacctctgccgttcagcttggcgcatatacctgaggccatgttctgagcgattttccaagaaaaaaaaatttactcacaatgttatggcattttggattgaggcaaaaatcattaaatatttcatttattcagttttatctgctttctcaaaaagctgaattgtcctaattagaatatcggtatttttcaaaaatacagaattacattttaatacaacttaatactattaaatattagtcacacattaaaaatatttgttccagaagagtgttgacaggagaaaaaaatctgactgggtgcggtggcgcacgagggcgaggcgggcagatcacttgaggtcaggagttcaagaccagcctggccaacatggtgaaaccttgtctctactaaaaatacaaaaattagcagggcgtggtggcaggcacctctaatcccagctactcgggaggctgagacatgagaatcgctggaacccaggaggcagaggttgcagtgagctgagattgtggcactgcacttcagcctgggtgacagagcaagactgtctcaaaaaaaaaaaaagataaaagatccactataaattttgagaaaatcataaccaatttcatactgtagcgtctcagttttataaatatattaacatatatttattcataaaatgtgtaaagaagatttatgagtgaaattatttttatgtttgtgttagctttaaaatacccatttaaaaaaaaaggggggaaagcaggcggataatacaaaactgctaaaatgctgaaatgtgaagctggatgatggtcacgggtgtttattactggacatgctctatgcttacttgcttgaaaacgctccattagaaaatgaactctgaaaactatatgcccaatgctaatagtgggtatttattggtaacactctttatcaggtgctatgattgttgatggctttattttcttcttcatattttctataatttctacaatgaacatgtatgtataatcagacaaaaaagccaagaaacatccataagtttttctggtcattcattcatcccataaatacttgctgagcacctgctgtaagccaggctccgagccggctgctgggtagagtgccgcaccccagggaacgctcagccctcgtggactcacctctgggcttgcccagcctaagccccgcagtaacagctggggtgaagcctgagggaggtgacagcctgcaatgcctgctggcccagcgagaacccaggcccagcaccatcgccaggttttacaggcataagaaccaagcctggagcctgggagtcttctgattgtcagaaataaaggtccgcaacagacggctctccaaaatgctccttccctgctgcagaaagtcaaagtcaccccaggtgctgctttccccgagagccaagtccaccaggagaagtagagggacacgggtaagccccaggcctcctctggcaggagtgggggtgtgggggcagtgcttaggttgcctggctgggtctaaggtctggagaggaaggtgcatgattttttttaatgtaaagatatagagaggcatcttacctgcagaggcaccagaggacaaatcccagtccacagtaagggtccaggcagatggccacttctctagaggggtaaagttcacactgcagcttaatggaacggcagaaggcactggtggctgcgtgagacatctgcaaaatacaaggctgtgttaaacgcatcggacctgacaccctcagacacccgggacaatacggggctgcagggaacgcaaggctgtgttgaacgcatcggacctgacaccctcagacacccgggacaatacggggctgcactgaacgcaaggctgttttgaacgcatcggacctgacaccctcagaaacccgggacaatacggggctgcactgaacgcaaggctgtgttgaacgcatcgggcctgacaccctcagacacccgggacaatacggggctgcactgaatgcatgggacttcatacccaaggatacctacaagacaataaagccgcattaaatgcgtggggcctgacacccaaagacatctttaagacaataaggccaaatgaaatgtatgctggcctggtgcagtggctcatacctgtaatcaaaacacttcaggaggccaaggtgggatggtcacttgagcccaggagttcccggctgcagtgagctatgattaccactgcactccagcctggacaacggagtgagaccctgtctcttcaataaattttagagaacaaaacccaaaagaacaacaaatgcacgatacctggccccaaaggcccaaagctgtttttaggactggcgacaactgtcaccaagctgggctatgttgtgtctggggaatgtgagtggctgatattttcactggagttctcattttcaatgagtaaacctcactcagaactgttggtcctccaggacctagcaactctagctattgaaatagtgcgtttgaacagcaagtcatggaggaaggggttctcgtgtaacccactctctctctttttttttttttgagatggagtcttgccctgtcgcccaggctggagtgcagtggtgcgatctccgctcactgcaaactccgcctcccaggttcacaccattctcctgcctcagcctcccaaggagctggggttacaggcgcccgccaccacgcccggctaattttttgtatttttagtagagacagggtttccccatgttaggcaggatggtctcgatctcctgacctcgtgatccacccgcctcggcctcccaaagtgctgggattacaggcacgagacaccgcgcctggcctcgtgtgaccctctctctaacacaccgtcccacaggtaggggaggcaccacggtgcattcctctgctggtcgaggccctgtcttattcacggctatctccacggctggacatagcctctgctgtgcagcatgtggccagcaagacctgctgggtggctcagctgtcttaatgatcagaaagtgaaggctcacagaagttaaagattttgctgcctgtgacataagttagagctaggagttagagcccaggtcctcctacactccagggcccttcactatcttccaccatcctgcatggagatggtggctaaaatccaatcatcccatcatgaccagacagtgaagagcttccgcatcttcctcttccctaatccctgtaatagtccccctacagtctgtgtgtaatgtcaattattttgaaatacaataaaatatattaataagatcaattttctcacagaagctttctagccaaacaaacctcagaggaaaaaggaagtcaaagcagcatacaaaatggtctgatttttgcggttttaaaacacgtcacggctgggcaaggtggctcacgcctgtgatcccagcactttgggaggccgaggcgggcagatcacaaggtcaggagatcgagaacatcctggctaacacagtgaaaccccatctctactaaacatacaaaaaattagctaggggtggtggcgcatgcctgtagtcccagctactcaggaggctgaggcaggagaatcgcttgaaccaagagggcggaggttgcagtgagctgagatcgcaccactgcactccagcctgggcaacagagcaagactccatctcaaacaaaaaaacatgtcacaagttgatctgaagtagaatgtcaccagagctaaactgtaaagggaccagcacagagccttgtaataactggggaaatccaaatgcctggctccccatcattcattcatcactccagcaagaggtgagagaacttggaggtgggagtcctcccactgtaaaacgttccatcactattggaagttctgcctgggagaaggtttcgtaactgttttactatattcatacaggggaacgtagaattattataaaatgtaaaatgtaaataattctttttagcttgcttttaaggcaaatttttgtttaaaggagaaatgagactgaatttatacaacatccatccagactcctgcctccctggattaggagttagtcaaaccctgcctcctaaaattacccacccactcagatcagcaactagagcaagcctgccctgaactgctgctctgtgcaaagcactatttctaggtggagaattcagttcttcagcttagcaaatactaaataccgagagcttgtgatcagacactgtgttaagcgctggagatgaaccgaagagtaagacacagccctgccctcaggatccagtgggaattcacagacgagggcatggacaaccgtgtatggggtgtaagagaggctgctcccaacaccctggctgtgggtcacaaagccagcggggcctttgcgggacttcagcagagaaacaggaattgacaccacttaaagaaaagcagccaggaacgttctgatggtctactctacgtcagacgctgagactataagcgggccatgaaacggtatgactggaagcagctgcttctcttctggctatgacagtgggagggtcacagctaacttcagaccacagtaagtaaatcatcttgatctgaaaacatttcttttcaaaagcttttgaaaaattattttatttcatattgtagctactttggtattccacctcagttctactaagaggtggacagagcgtgagaactgtgcgaggtaaagccagctcacccgtcagacccacagatgggggcagacggcacacaaggctgcgaagtccccaagggtggggcgggggcggggcgggggggggtttgcacggcacctcggcaagggcggcatctgagctgagagggtcatgatgatttctaatagagcccaggttaaaacgctagaaagtgcagtgtgcagaaatttatcacagagcgttcggatttgagaaccagcaagagaaaaacattcgcagtgttctactgtcagctgagacagtgttcacataaaaacatacttggggcatttggacagaatcagtcagcctggttaaggatggaaatggtcatacgtgtcataccgtgaatgaaacacgtatgtatacctctttccacatctcagtctgactacacgagaggcgctgagagccagcacgtgacctgccacctccagcacgctccgcagttgcctccatggccaccgcccgcagccacccccctcacctttacgccagctagcatcccagttgtggacacgctgaagtcgagatatgcaagagtgtctgggttgcaaggtttgcagatctgggcaggccgcttctttggcaaatcatctggagaggaacatgactatcagcagatccagcctgagcaaggccgtgagcaaaccaccttctgcagctaaagcaccaacctgtgtccaggatgaggggccacgtcctgacgtccacagccgccgccgcctccctggaccgcagcaacttacagatcagctgtgtcgtcatcagacaggcagagcgactcacctggcatcagagagcgagaatggagccatgaacgtggacccagatgaaagcgtgctcacttcacacgggtctcctgcttactacatacactaaaaccatgtagctttaacgggcagatgaggttaccgagccctcctgctggctaaggtaggacagagctaggagtctagttgtggaggcacgggggcagggcatgcggcctgaagctgctgcatctgcacttcctgggcccagtgcatccacagcgttgtgacatgtgcagaaaagagctcactgctcacaccattagatctgttctcctggaaaccccacacacacacacccagacacatcgcgcacagttctcccggaaacgtcacacacacccaggcacatcgcgcacagttctcccggaaaccccacaaacacccatcccagacacaccgcgcatagttctcccggaaaccccccacacccccaacccagacacactgcgcatagttctcccggaaaccccacactcacccaacccagacacatcgcgcatagttctcccgggaaccctacatacacccaacccagacacatcacgtatagttctcccggaaacgtcacactcacccagacacaccgcgcatagttctcccggaaaccccacactcacccaacccagacacatcgcgcatagttctcccgggaaccctacatacacccaacccagacacatcacgtatagttctcccggaaacgtcacactcacccagacacaccgcgcatagttctcccggaaaccccacactcacccaacccagacacatcgcgcatagttctcccgggaaccctacatacacccaacccagacacatcacgtatagttctcccggaaacgtcacactcacccagacacaccacgcatagttctcccggaaaccccacactcacccaacccagacacatcgcgcatagttctcccgggaaccctacatacacccaacccagacacatcacgtatagttctcccggaaacgtcacactcacccagacacaccgcgcatagttctcccaggaaccccacactcacccaacccagacacaccgcgcatagttctcccgggaaccccacactcacccaacccagacatatcgcgtatagttctcctggaaacgtcacacacacccaacccagacacatcgcgcatagttctcccggaaacgtcacacacacccagacacatcgcgcatagttctcccggaaaccccacactcacccaacccagacatatcgcgtatagttctcccggaaacgtcacacacacccaacccagacatatcgcgtatagttctcccggaaacgtcacacacacccaacccagacacatcgcgcatagttctcccggaaaccccacacgcacccagacacatcgcgcatagttctcccggaaaccccacactcacccaacccagacacatcgcgcatagttctcctggaaaccccacactcacccaacccagacacaccgcgcatagttctcccgggaaccccacactcacccaacccagacatatcgcgtatagttctcccggaaacgtcacacacacccaacccagacacaccgcgcatagttctcccggaaacgtcacacacacccagacacatcacgcatagttctcccggaaacgtcacacgcacccggacacatcgcgcgtagttctcccggaaacgtcacacgcacccggacacatcgcgcgtagttctcccggaaacgtcacacgcacccagacacatcacgcgtagttctcccggaaacgtcacacgcacccggacacatcgcgcgtagttctcccggaaacgtcacacgcacccggacacatcgcgcgtagttctcccggaaacgtcacacgcacccggacacatcgcgcgtagttctcccggaaacgtcacacgcacccggacacatcgcgcatagttctcccggaaaccccacactcacccggacacatcgcgcatagttctcccggaaaccccacactcacccggacacatcgcgcatagttctcccggaaaccccacactcacccggacacatcgcgcatagttctcccggaaaccccacacgcacccaacccagacacatcgtgcatagttctcccggaaaccccacacgcacccaacccagacacatcacgcatagttctcccgggaaccccacactcacccaacccagacatatcgcgtatagttctcccggaaacgtcacacacacccaacccagacacatcgcgcatagttctcccggaaacgtcacacgcacccggacacatcgcgcatagttctcccggaaacgtcacacgcacccagacacatcgcgcatagttctcccggaaaccccacactcacccggacacattgcgcatagttctcccggaaaccccacacgcacccaacccagacacatcgcgcatagctctcccggaaaccccacacgcacccagacacatcgcgcatagttctcccggaaaccctacatacacccaacccagacacatcgcgcatagttctcccggaaaccccacactcacccagacacatcgcgcatagctctcccggaaaccccacacgcacccaacccagacacatcgcgcatagttctcccggaaaccctacatacacccaacccagacacatcgcgcatagttctcccggaaaccccacactcacccagacacatcgcgcatagctctcctggaaaccccacacgcacccagacgcgtcgcgcatagctctcccggaaaccccacacgcacccagacgcgtcgcgcatagctctcccggaaaccccacactcacccagacgcgtcgcgcatagctctcctggaaacgtcacacacacccagatgcgtcgcgcatagctctcccggaaaccccagacgcgtcgcgcatagctctcctggaaaccccacacgcacccagacgcgtcgccacactttctaggagtggccactgtgcaggtctccaggaccatgccaaaagggactcaggtgtgggtaggacaggtgcattctctgcccacactgttctcccctgtacttcctccttcaacgaggaaaatatagctgaatcctctcaaactcctccagctgtagacgaaggaaaacagatctatactttcaaaaaggagcaggaaacttccacatcttgaggagagggctttggaaaaagccctgcctcttcccgtggtcggtctgctcagctgggttcgtgaggaagcccgaggaatggtggtgatgccctctcttgggagccgttttctccagggaagaccctgcagaggctaccatccagcctctgcctccacacacgtttacatctcgcttctagacctagactctaggctccctgcaggtagagaccctgtcctgaccgtttgactccagacacaccccggcttccacagccagcagctgccccaagagatgtcagagtctgcgcgttgcaagctccacactcagctccaggcaggtggaggccccgacattcccaggcatgttacctccacaatcatcttgacggtaggcaacgtcgtcgcgatgttctgtgggtgcgggggacggacggttattggcacacagcctgcgtacaggcaaccataaaacgctgctatcaggtctattcctacacaaggagagaaacatcatcattgaagcagaccacgctgctgagtgcacactctccctgtcagcatcaatgcttgtctggggcaagttcaacagggaaacgagcagctgagcttctcacagcctccgtcatcctggcgggttttgtcagctttggcggtcactgtcatttacctgtcctttcagacatgaggtgacgaggcagcctggaggtttaatgtctacatcattttgctaaggaattacccacctttgtaactgtgaatttagtcaagatttaggtactattaagtgaattacctgaggtatctaataacacaaatttggatataaaagtcattgaaagcatcactttattgacgcctctcacagtagcacatgcggctggtgcctgtgagtggtcgtagccagacacaaacgggctggttagcatccagctggatacagtgcagactcccagccatgacgcgaccctcggctcaggcaccagcgggtgtaagggacctcctcgcaccgcggctgaccggcttgccatctctcaggggaagcccaccctgcgcctgtacctggggggtagaccaaggccacgtggtcgccgtcctgaaggtggcccctctccatcagcatcacggcgatcttctcagctctcttgtgcagctgcacgcaggtcagcgagttcgctatcgcaccctgcgggccgatcacagggacaagcacataagattccttcagcagagcagcttgcagagagcgcgcacgcgtcatacaactcactggcgcaaagcatacatcactggtttttagaacaagcacagacctgtgcaaccaacatgacagtcaattttagaacgtttttagcctcccccaaaactacatatacgttagaggtcaactccattttcttccaactaggtaagcagtgcagaccaaagaaacatctagatatatttagagtaacaagcaatattttaaaaaatgattacgtgaattaaaaaacggtagaacaaaaaaccctggcaattctgggacttgtgtcattgtcgtgggcagtgggaattcctagtacacctgcacatcggaagactaattaaaaaattttatttagaaagaccacatcaaaaatcaaggaagtcagaaagcaaaaaacaaaagcaaaataaacaaacacaccctacaggaatgaaaagaactatcaaacgcattttcacatagactttaatgtacaaacaaatagaaaacatatttgtgcaggaaaataccttacacgagggttgtgagggaaggtgagttgcaagatatataccaagaaacatcgcaagagtgtgggattcgctgttttttgagacagggtctctgtctcccaggctggagtgcagtggcatgatcactgctcactgcagcctggacctgctgggctcaagcaattctgctgcctcagccccaagtagctgggactacaggtgccaccatcatgactggctaattttaaaaaaaaattctctcatagagatggggtctccctacattgcccaagctggtctcaaactcgtggcctcaagtgatcttcccatcttggcctatttaagccataaagacaaatgtgaataaattacaaattataagcacgtaactaaccgaaacaagcttttcctgaggacacactttacagtcctagttcctttgcagcactctcagatgtgaagacggcttctacagtcatttaacaacctcttctttgtgatcagattctgtctcacagctattaacagggtgaggatcttccctcaagcagtgggcaactggactgcagtccatggggtcaggaagactgcagagccgaagagtgactgaacacccgggctcaggaatttttttttttttttttttttttttgagatggggtctcgctctgtcgccaggctggagtgcagtggcgcgatctcagctcacggcaacctccgccttccggattcaagcaattctcccgttctcctgcctcagcctcctgggcagctgggactacagatgcacaccaacacgcccaactaatttttgtatttttagtagaaatgggggtttcactatgttggccaggatggtcttgaactcctgacctcatgatccgcccgccttggcctcccagagtgctgggattacaggtgtgagccatcatgcccagcccaggaattcttatgtgagtcacagctacaaagatgaatgcatgagtgtagggatggagcgcgcggcgggcctggcaaggctgtcgggaccggacgctgtgattcagagattggggacagagtgcacagcgagcccgagatggctgtcggggaccagacactgcgattcagagtgaaggcgcagggagagaggcccagaggggcttgcgggtagccgagttagtgcaaccaaaaggacgccgcacggacgaacagtatctggggctattcatcggcgatgctgggaaaagcacgtcagcctcccagctcgaagggcccgtgtcagaaacacatggcggggcacggtgagtggaagataatgtctcaggaagcatcaagatgtgaacacctgaccctgacctctaccaaaacgtccacaagacagccgatgagcgcagcgaggtctgtggggaaagtatactctccctgaggacctctgcgccagggccaggaccagggctgcggggaggcggcccacgtcactgcccggtgggtcttcagacccttcctgccgcctgtggctggtctcctccatggagaggattagcttacatttctctgaattcaaccttctcatcccacacattttccttgattatttccccacttagaggacacctaaaaaattagaaaacagaaactgatttaaagtagaagagcccaagagcaggtggcagcagagatgggcagagacaacaaggaacgcagggctggagtccgggaaatcctgctgagaagacagatttgggggcctttgaaactggactgttcctctgagcatttactcttagaggggctccttgccacctgttcacagcaaccagcccaccggctccttgccgccaacgtcctctgagctcttcaagtgaacatgggacagagacacccagcacggccaggctgggtgctgatgggacccattcaagtccaccccgactccaggggcaggtctcccaacaaggaaaaccagcacaccacccatcgctgtgagcatggacgcgtctcagagaagagccctggcagaatcagctcagcccccgccccgctgagggaggccccgacccccacagtccattctcatgccaggcctgcctgcagcagcagtgcccagtctggtttgttcggcttgtggaactgtttcttccccatctctggagagctgaagctgatttcctatcaaacacccgctttgctgtcagatgacaaagcctgtggtttgcccacattctgggtcctgagatttgagaggctcagatgagacacagccagcagccaagagtgtctttgaaaatgttttgattctggtgcacagaaatccccacctgtaggtacttgcaaagcatgagtgtaacatgcatgctgtcctttatctttgataaccctgtgaaacacaattttctcaatgctggttgatgtctttcagggctgacataaaaacaaacagcaaagcttccaggcacgctccacgaggacggtgcccttctcaggtgttaggtcccaaagccagctcacagggtgatttaaattaagttcttaaaaagccccttgagatagtgctgtgctggagacaggcacacgatttcacagccggtcggacatgagcagacacccctcgctccatggccaggcagggccatgggtcacaccaggtgggcgcctttcttgcctggaaaggacgaggtgagtgaacactggaccccaccgttggctgggagggacagtcgctcctggctcacgttgcaggctggcagtcccaggcacctgcagcgactgagcagtgtcccttcttccttgccacctttccccaccccgtgtggttgaacgggacacagctacaccacacggcaactccacacacgtgacactgttcctcagccttgctccccaggaatcctaatgcagcctctaccccaggagaaatgccagtaacttttgcttgcactttccattttcccatgaactccgtgttaagaatgtgatgcattctcggcgagtgtcccataaagcaacaaccattcaccgcaggtgacagtcgtcattctctggcatcctcatcaacattcactggggtttccgtcctgaaacccaccagctaagaagaaggttctaggtaaaaccatttcatcagagaaatgagggctggcttttcccccacagaagtgctgggaggcagcatgaccggaggggcacacagggaaacacaaagagtctgcccttgtctaaggacacacattcactgtcagtttctgtaaacttgggaccattttaacgtttcacattaaatcaaacaacttgggggaaaaaaaacccaagaagaaaaagccaaactaaatttatattttaaaattctaaagaaggtataagttaaaaaaggtcaaaagagttggctacaaacccattggttcaaccatttaatttttttcgagatagagtcttgctctgttgcccaggttggagtgcagtggcatgatcttggctcactgcaacctctgcttcccgggttcaagcgactctcgtgcttccagcctcccaagtagctgggattacaggcatgtgccaaaacacccagctatttttttttgtattttagtagagacggggtttcaccatgttggccaggctggtctcaaactcccgacctcaactgatccacccaaagtgctgggattgcaggcgtgagccatggtgcctggcctccaccactttaaatgagcttgtgactacacggccagcaagaccgggccaaattcatcatcagcagaaacgtgcatccttgatggaagcagcggctggggggctggtgtacgtgctgaacggacacttatggtgtgtggagtgattcatcactggaacgaatttcatgtttcttcttcctttttaaaatcttgcttttagaaaatgcatgattctgtatgtggcgtgtactgagtttccgctggacggtgctgaacagggaagctgatttaggtggggaaagacactatgaatgccgtgaggacgatgctgctaccttggtccaggcccagcatctcttcagtgtgcatacgaggcagcagaggagcgaaggacccatgcctgatctgatgcttggcgcaaaataacacaagcaatagctcaagcgtgcctgcctctgtgtccagcgagccttggaaacagctcacacctccaaggaaaagacatcctcaggccatgccttccacacagtcctaaggtaaatcactcatggctctgatccctacatctggcccccatcggatttgcagttgatcctaataaagccctttttagagaaccggaatcatttccgggaaatacattttccctgaagatccagcatccagctatgcaggtgaccacaggtgttcagggacactgggctgtccacagggccagatagaccagatgccaagcccaggaccatggcaccacccagcaatctgagggatcttccccaaatcaggcacagctggaacagctctattttcctcctcctgatggtacatgttgcccatgaacgtacccaaatcatgtctgaatctttgcgtatatgggggtctgctacttcttgagctgcccatcaatacctctagattactggacacatgcttgtgcaacccccacacatgggagcagcgtgtcaggcaacatcaaggcagagattcagggagactgagagctgactctgcccctgactgcttgcagcttgcggaggggtagccacctctgtgaggaaattaggggagggaggaagcactttcagcagaagggatctggggtgccgaaggaggctggagttagtgctgcagatttaggtcaccacgttggagatgatactggaaatctctagagaactgccaagaccacagggaaagaggaacgagaagtcacaggcagtttacaggagaaacactactgggagaggacaaagtcagacaagcagagatgggcaggaaatcaagacagcacccaaggccggcgaacctggcgatcgggttagcaaagggggtatcatccatattcacaggctgaggaagggtccagtggagaaagatgaaaagtggaaggtgggcatttcagatacagggacccacagcaactccagtcctcaagatctccggcccccacacctgagctctcagcgtggggcaggggctccgtcacagcaccagcgaacgagggccagaaggtggtggcagaaacgggccttcctggttttaaagcctcttcctgggaaacagtcttgagcagatacagtgaacgaccaatggctgggatcaactcagcatccgtgacaacgtcaagacgacacgcgcttctctggcagaggaggaggagaggttgttcctatgaactaagccacgtgcagagaatggtctgataactgaaactcaaaccagagagtcggggaataatttcgtgatgctgctggcatttccttttgtcttcaatctgctgcttcgcacactaagattttgatactcagcaattctaaacagccatgactttttgaagagttgcaagtacctatacttgtcaagaagacttacatttttcttccatttttcaagctttatttccatggtaaaaagtagtaacaagcatattaagatttttgcatttaatttttcttgttaatagtattagcttgtttatttaatgccttactcttaagtactacggtggaacaatatttgatgagtgtagttttctcatgtaaagtgtaaacaggaaatttaattacaaagtggaaatgattttcattcctgagtctgcaataaacataacttctggtgtataaaaaagtggtttagggctcggtgtggtgactcacgcctgtaatcccagcactttgggaggccaaggcaggtggatcactcaaggccaggaattcaagaccatcctcgccaacatggtgaaaccccatctctaaatactaaaaatacaaaaattagccagatgtggtggtgggcacttgtagtcccagctacccggaggctgatgcacgagaattgcttcaaccagggaggtggaggttgcagtgagcggagatcgtgccactgaactctagcctgggcaacagagcgagactgcctcaaaacacaaaacaaaacaaaaactagtttagtaatcaaaataaaaatgcaaatatctcatagacttacgatttctctcttgcagatatcattactcattttgggggagaaatattgtaaataggttgctaaaatatctgtacacacaaataggtgtaaataactgcacaaatggttacgtttaaaaacaatccctaggtacaaaagtctcagtcaaaatagcaaaacataaaaagaattcccataagactgaagcaaaaggattcaaagaaagaagcaggagcgctcccaggaaccaggctaggccccttgaggccagtagccagggaaggccagctccgcgcctcacccgacagttgagcagcgtgtagaggatgtggtccggggtggtctgtgctctccactgcaagacctctgagaggaacaggaactggaacagagcacgggcatgaggatcaggctgtgcggttggatcaggctgtgcgggctgaggtggggcaacctggatactcaaacccatagaggctgagtgctttgggtcttaaaaccgcatgcttctctgcagggagttgaagacatgcatgctgggaaaatccccgtcacacacgaccacaggacaagcaagtgcccacagctttgttcctgcagggacttaggttcacagcacccgagtcagggtcacaaagcaaagggctggtgctgcaccctggtgtgagaagttttctgaaagtctgcccaaggatgggaaccatttccctcataggcaggagcagcctgcacagaaatcccttctcctggggcttccagaagatgcaaagcggattttggtggctacagtgagagaatcagatctatctggttttaaaaagcgggatctaataaatttaggtttctagaatggcaataccctgatggcatgaagccacaaattaaacaaaccacatgtgtgctactgagctggtccacagtaaaaggggcagccttatttcacatcagggtacagaaaaacccacagataaggtttcatccgtttcatcaacatttcacggtgctgattttgccccatttcctaatgggccacacacaagggcacacttttggctgtgggaaacaggaaggccgaacggttctaatggggaccgtggacgcacacggcacaatgtgcaaagtctgggcctcgggagtttctcccacggcttctaacgccactgttaggaggcctggccccctaacctgggttttgaactgcttcttagagtccacagagcacaggacagaagccttgctgcaagctgctgtgggcagggtgggctttgaatccgggctggtggggaaactagaaaggagtagttcaggggaccgtgcgcgggacaaggactgccagacatttgcctcggtcctgcgagtcgtgggactggacacccctcaccgatttctgcatcgctgtgacattttctgaaactttgtatctcctataaacacatttttcttatgaaattatatggtctcttgcaggagaggacaggtagaataaaggaagatctgcagtggtggtccaccaccagcgcgcgacatcggagactgtcgggaaagtcggggactgtcggggacggttgcggacagtcagacactgtcgcggactgtcagggaaggtaggggacagtcgggtactgtcggggatggtcgcagatggtcggggacagtcggaaaagtcggggacggtcggggagactcagggacccagctcctaccttgcgtgcctggtcgttatcttcgatctgacccaggtctctgccactggcctgggcgattctcttcccagagaccaggttccccaccatcacagaggcagggccgatttctagaaagaaacagagacatggccatgaggaaacaaaagagaaattccttcagactagacctcccactttggtaaagaccttactctcggaaaacttctggaaagacctggctttgaataaaccttctaagaacagagattcaacgaaatcaaatgattgtgaagggggagtgtaacaagccttggtcaggttcttcagaaacgatgtttttatcatccctgaagctccctggaggccctccaagcccacgcctgactttccagttaatgtgagagccccgtgtgccggcactcacagccatgattgtaaaaaataaaacggaagacacacacagaattaaaagccacgatttgtctcactgcagagacctgtggctcccgtctgttcgagttctctggggtccacacacctgagagctggctgtggacaaacagacagtggacatttcacatacagatgtcgtggggtggagtcagagagtgatactgtggacgggacaggatagagtcgcttctcggtatgttatactgactgaaaaggtcttaggttctgtcaggcccacagtgaggtgtggaagaataaaccaagggctgtcataaagtcatcgcttatccatgagcgatgagatgactaccaactggggaaagtggggaagaagggggggtgggaggtgggggacgggggtgggaggtgggggacgggggatgggaggtgggggacgggggtgggaggtgggggacgggggatgggaggtgggggacgggggatgggaggtgggggacgggggtgggaggtgggggacgggggatgggggatgggaggtgggggacgggggtgggaggtgggggacgggggtgggaggtgggggacgggggattggagggggcagagggatgggggatgggcagggggaggagcagaggaagcagggagagtaaaagaatgtttaccaaaagaattgcaggtaaaataacaatgatatgatcaatttatgcctaatccttggtttgaaggctactattaaatcaaattcttaaattcccgataaaggtcaagtaacaggtttctaagccaggccacatgctgcattagttactgcacaagcagggctatggctaagcaggttgctcatagccgtgtcaaaaacagacacacgtgcccagatgcagctgacggggcagtggcacagaacaaggcttcggatgagcccatcaccatgacaaccgatgtccctcggcttcccaaaaagctcacggaaatggtggcaccagaacaaggcagtcagggcctgacgtcctctagccggcccccagggagagcagggccaccggctctctacagatgcacggccatccttttcaaatgcaggctgccagaaacgattccacttatcacagctgcgcaggagaaggcacggcacttcagccaggattgaaatctggaggagaacggtctatgagcagatgtctgggctgctgcctgccggtgccttgggttctaggcgacgtgtaggagcctcgagtctggactctgtgtaacagtaagatgcctcctacactcggcaaatcatttttgaattttcacgtcgtagttgtgaacagactgaatttcttttcttagttcttaatgaagtatggaagaggaatagccttttcacatttagcaaaagaatttgtcaggctctggaaggaagggagctgccccgtggtgggaacaattgcccctctgtgatctccaaacacctgggagcccctgcacgatctcagaacacaacacccgggagaccctcattcacccgctgcgcatcctctatctctaccagatagaagcgtcttctgaatgaagcatctttaacagattttttttgagacagaatctgactatgttgcccaggctggtctcgaagtcctgggctccactgattctcccatcctggcctcccgcattgctgggaccacaggcgtgagccactgcgcctggctgatgaagctctgagccttctccttggtgaccgatgctgggcaagacgagacggctcttctaagaagtcaacttggaaactggcctaaatgggttccaaggtttcccgtaatgtttttaagaattcagactggggtagggaaagcgagcttttgaggagagatcaggctttttgtggagccttattttgtgcccgtttgctacatgaagacgtagcacgttccctcatctccacgtgcatcctctgaatggaagtttgggaccttgaatgcctccccatgcagactagggcctgttttcccgactgctcctgggaggcagaggccttctagctgcacctcactctcaaagtctgttcttggcagcagctgacagtgtcccctgttgaagagaggtgggcatgtcccaaatgcccccagggtatatcacagcctcgccatttaagctacagagttgagaggaatcccaaaacgtgtgtatttgaggctcatgtctcttttctcttcccgctcccattaatggattcacccatctgcaagtcggcagccgcatcgctggtattatcaaatatcctaccatgcaatgcttggcgaattcgctcagggcacagggcgggagttttatctcaaagacagcagcgagacacacaaatcccaagtgggaggcaagcccttcccaggtgccaggctctggcctcagcagactcttcctgctattcgggggcaatattcccagggacctttaaagctgtggaattgtaccttgttttgtaactctgtaatatttttgccagctcagctgctgagttaaaggtctcttaatacttttgtgctcaaataagataatctgagggtacacagtgccattaactgagtaaatatgaattcatgcagtaagaaaggcaatttgggtgtcaataggctgtctctgtttccagcatctcagaacactgtcacccacaaatggcctcaacgaatgtttgctttggcttccaataatggctactcacctgtcagggtcattttaaatgtttattcgaaggggccttagaaatcatccagcccaattcccttctctgtggttcgaagctggggccccggggcaggggacgtctgctaagctgcgtatcaggccctcagcagagacgtagggcctcagctctgccagttaatatttgttaaaaagctttttaaagacacaaaattatgtaacctctcagtttagcaaaaacagatgagacactaaatatatatatactattttctttctttcaagttatcaatcacatgaagcttcatttaatgaagtacattattagagtaaaaagatttccaatctcctgggccactattccccagctaaactcctaaggaagagggctttctgcaggaggtcacactcctgaccgcagtgtgaggttgctggctctgtctccccactgggttttcctgacctcggcgtgaggctgctggctgctctctctcgcctgggttttcccggtcactgggcttctcgacatttggctcaggtgagccgagccctgtagctatggagtcattacagctttgtatttgcaaaggatcctcctccttccataaacacttgtctgaaccctgtctccaccagctactgaactacttcccagctgggaccgtgggtcactggggttgctgggttgagagtgtctgacaatcaaacagtggggagagaggatcaggtcacttcggagtttacaatgaggataccctggagagcgctgacaccattataaatcttcatactacagaaacagcctggggagagcaactgcctccgtgtccttcacaaggctgtttacgtcccgaggcggcagacagaggcagcgttttccaccctttcagagcactccctgagggacgatgcccatggcttgagcggctcccaacagaaggccacgcacccacagaatgtggtgaaatggatactgttccctgcaactccacattccccgtgtcaatcataaaaaccagggaccgcgagaacaacagtgtggggggaaaactgtgccaatcaaacaccagagaccatgagaacagccgtgtgtgggagggggcggaaacaaactgtgccaatcaaacaccagagaccatgagaacaatggtgtgggggaaaaaaaaaagaaatggaggaggaatatttaaggaaatctgcaacataagaaaaaaattagaagtaggtcagaaatgaaagagcaaccatacgtgtgaacccaatgtgcttagaaagtgagagcaccgtggccgtgtccttcaggagaatgagcttttgctacgggagaacagagccagtaagttacgtgctgacgaccacactaacacccctgagcctacagagaataaaagcaaggcatttacagccagaagaccagaatccaagttgcccccacccattctattttcttggggtaaccacttctttcccgcaagcatcagcttcctgcaagcagccctgggtgaactcccgcacctcccagtgccgtgcagccccaagggaactcccgcacctcacaagctgcccaagtggtgcacatacctggctgcttctgtcgaggcttaggcaagtttgtgacgcaggtgtgggggcacattaggacattgcaggggtgcagagagccctccagaaaaagctgttttgtttctgataaatggatcccaccaagcggggttttggggagggtgtttgctggcaccaaggccaggcaataaactccaacttgatgtatactgtcaatcgcctagaaagttaataaagaggaaatcatgttataagaggaagtataaacagtacgtatttatattatgcaaaatatgatccacaatacacagaagtctgtgcagtataagcactgttcccagcataaaaatgccaaggtaagagaaaggattttcctactaaactcaccaaagctgaataatgttacccagggcttgtggaagaccatacacagtaaaaaaggaactttggagaaaagataacatgttctcaagatcaaacaaaaagcttacttcgacctccccaaggtgtccggtaggaaccagctgtgcaaattcctggtccctacaccctcgatctgctgagctagtttctggacacttgatgtagttcctgatcaaatgaagggaagggaaaaagggccaccccatgggcaaagcaacagctggtcacaccatgatctgaatgaagtaaggaggccagaaacaagacacaggggaccagtgcccagggcgagggagggcaacctgcagcacacggctcatccactggaaactgtcctcttccgtggagtcaggcctctgctcagccacgatcacgatcctctcgtcgtgcagcacggtcaccgagaacacggctatcctgcggggacacaggagcatggtgagcacgcgccggggacgctcatgcagccctccctccgccatcaggggctccataaccatcactagtgagtgacacagctccaactacgacttcaaaacggccgctgtacttccgaatttccccacactcatcagtacgggaagaactgtgggaggcgcccagggatgctgccgaggcaaggtcaccctgatccccacggaggccacacacagcacccgcgggctctggtgaccaggttgcgcctttcggtacagaggggcaaatgcgcaatgatcagacctgctgaaatttagggagtcacacccttcacagctcgagtttgcacccgtgaagttaacggtctccaaatcagtagaaatttgccgtttcagaactagtgattttctgctaagtgtatgtgccttatactgtcagcacagcacagtcacctccagtaaaagagattgtagctgtaaagataattcaaaggcagcaacatcatatccaggtatctacttcctgctcccatcagcttccaaactgaaaaaaggctctaaaacactttatgacttcctccagattggcaaaaactcaggaaccgtggcaacttatttcatcacggagcctccactgtgcaccaggcaaggcagggagaagaaaactggtagagcggggaggtggcgagcgtctgcactcacacaagtctgtgactgaaccattgtccttgggtctctccaacccgctccacgatggatatctggatctttaatttgtgcagttatttatcagaaataagttttctaatgcatatttctattatacttagaggggaagttcaatggaaatatatttatggagctcagggaatttctataaaatcttggacattcagaactggattaaatctcagaggtcagagtccagttgcttcaataacatggaagaggaaacggagacacaatacatttaaggaaactgtgcaactttcaacccttcaaaaccacataaaaaatatggccgaccggaaaccatatgcttgatttgcagaacgccactgaccttccccggtagacaaacttcatgggttctacggccagcgcagtggccacgatgtcgtcggcgttgtgcctgcgcccgctgaccaccatgaggccatccatcttgcccaccacgaagacgaggcctccgggacccacgaaccccagcaagcctgtccttatgaatgggtattcactgatcggagccccggagcttgtcatgggaaacacctgggggaaacagcatccatcaggccactgttcatgtggtcagctggttttaatcctcgccgctactcctgggagcacggcacctgctttgcttaagctctgcctttcaccccagcaaccctgccctagggccgaggtcacagtgaccgctggtggccaacagtcttcgaggcagaaaagcacttcctgcccacctcagcaggaccccatccgttcctgcacctccactcacctgctggagcctcctgcctctgaaccctgaacagataacacccagaagtctcacaggaggccaatcagcagtaactgattacttggtttacaaaaccacaatgtaaaagacgagtgaagagtcaaggtacattttaaacaacgtctgttagttttaaagtaatctctcttcattcataaaatgttatttgcccttgttggaagtatgctgaaaagaaaaatattaaggaagcaaatcagatcagttcaaactctaaccctcttttttcctccacccttgcagataaaccagagaaacggagatggagtttttatttagatttgtatccagctcagtttcgagggatattttagaaagttgaattcacactcaagaaagctatcatagacaggtactgtaacatctgttcagccacatccaaagttctcaacatttagaccagcaacagtggctcatgcctgtaatcccggcactttaggaggctaagatgggaggattgcttgaggccaggagtttgagatcagcctggacaacagcatgagaccccatatgtacacaagaattttttttttaattattcaggtgtggtggcacacgcctgtactcccagtgactcggaggctgaggcaggaagatggcttgagcccaggagtttgaagctgcagtgagctgtgaacgtgccactgccctccagcctgagtgacagagcaagaccctgtctcaacaacaaccaaaagttctaaacatttaggaaatgtatccccaaacaatttatattttcttacatataacttaaatgttgtgctacttctaaggccaggacctacttggtaaaaagataagagttctgagttgcagcactgaacgtgtgtctgagcccttcattacacagcacatctgtgcacacgccccatgcacgcacattacacacgcatctgtgtacaccacatgcatacttgcttgtgccactgagatcgttacatacacgtgtgctcgagttctcacaggttcatacctggccacatctagcccaggccgaggagccgtaaaggggctctagttggcttccccaggcgagggttcgtacctggccacgtgtagcccaggccaaggggctgtaaaggggctccacttggcttccccaggcaaggcccttcacgcacacaagtgcacgttcaataatgatccacttttcacagtaaaagtgagaaaagtaacaaaaaggatcctttttaaagcatgcttattcttttaaacactggttataaggtcagaacaatgctgataaaacaaatttatcaaaagcgataaaaagtggtaaagtgccatcgttttcattcatataaacacgtcttgctaaaatggatcttacattccacgtctatcactatgcacctggcaagggctctttggagacggagccacagatggtgcccatggtaagactctcctccacctacctcaaaggtgttcttggtcatgccagagaggccatagtaggacgtgcccgtcgcaactgcacacacacacagctccccgatctcatccgttctgcacagctgaggaaccccgtctggcttcactgaacacatgatggctaaaagcaaacaggaaagcacatgcagtgtgagagggggcaggtggggagaataaaggaaacagggaagacgcgaatatgaacgacaccagtgaacaggaatggggtctggagcaaaactgcacggatggtagtcagccaggcactcattttccctaaagagccatgagttttcctgttgcagcaacatgtcaaatttcatagttgaaacatcaataaatatttcaattgctttaatgttaatgcgcaagttgtatttaggggcgtgacatcatctgccatttagatatggggaggaacctcagaactaacatcaggaccacctgccacaccagacatcagcaacgtggtgcaacttgacctctgcaaatcaagcctctaatgtcttatggaaatctgaatcttcgatttcacactccgtgcaaggtgagcccttccgagaacaccactggagcgctttgcacacggttcaatgctgataagttctcactggtctgtgccaccaacactttcatgctttgcccaacaacatcctacataccccccaactgcaatccacaaatctgattagggagccaagagcctcaggcttcagaagggtggagtgtgcattagtgacagctgagctgtttagaaagagcctaaaacagccggcacccgctgggctggagtacagaacagtggaaacataagttaaactcacaggaagaaagattcacattaaggccggacgcggtggctcacgcctgtaatcccagtactttgggaggccgaggcgggcggatcacaaggtcaggagatcgagaccatcctggctaacatggtgaaaccccgtctctactaaaaatacaaaaaagtagccgggcgcagtggcgggcgcctgtagtcccagctcctcgggaggcggaggcaggagaatggcgtgaacccgggaggcagagcctgcggtgaaccgagatcgcgccactgcactccagcctgggcgacagcgagactccgtctcagaaaaaaaaaaaaaaaaagttcacattaaatttacactgaaagattcttcacccatcagattggtaaaaacaaaagtcaggtaacacggtgggtaaggagtggagaaagaagtgctgctgcttaccgctcggcagggtacagcttcacaaccttcgaaaagacaatcacaaaaatcacatcggcagttctctttgaaacacaactcccacttctagaactgtttccattagacacgagggggtcactcactgcagcagcaaaagagggaaattcaccaaacgggggggctcaaataaacttagtgcccccacaaggtagcactgtgctgccttgagaacaccgcggagctcgttacgcgctgacaaaggaccctcaggataaaacatgcgtatgtacgcagtactccatcatgacgtgagaaaaccccggaacccagggcagaggacacacacggggtgggggtgcaggcttctgttccacagccccaggtgcctccgacgggggcccgggaagcccgcggttgctctcactgccgcacagccccaggtgcctccgacgggggcccgggaagcccgcggttgctctcactgctgcacagccccaggtgcctccgacgggggcccgggaagcccgcggttgctctcactgctgcacagccccaggtgcctccgacgggggcccgggaagcccgcggttgctctcactgctgcacagccccaggtgcctccgacgggggcccgggaagcccgcggttgctctcactgctgcacagccccaggtgcctccgacgggggcccgggaagcccgcggttgctctcactgctgcacagccccaggtgcctctgacaggggcctgggaagcccgcggttgttctcacagtcacaaaggagcattttcattgtgtccttcagaaccttttgaagatttcaccatgcagttccatttatttgaaaattaaatattaaagaaatggagccaggggggcctggccacagctgggaggcagggagtgggctggacacaggggctagagggctgcaggcagaggcagagctgcggggatgctggagggcgtccgcagggaatcagggagtagtgaggaggagggaagccacgggctgccttcatttcttttatgccaaacaggccgaacagaaaggcgagacagcttctggagtgcctggccctagcgcagctcaccatgaaggggcatgaggggtctgcctctgtgagactccatggggcgagggtccctgctgaggcccacctgacctggcgccctgcacctgctgctgaaggcggcagcactgctcgcacaggcatggctaccctgctgggcttgagcccacaccccatgcctggagggctcagcaggagacacaggctccaggattcccagctgagaaaagagacgggttccctttctggggccaaacagccaggggctgatgctgcctgtgaccccatgagttgagcgccaagcgtgtgcaccctaagaatggtaaagcggctcctgggaggtgcctgggcgctcctcgtggggctggtggggaggcacggcgggccctgcagctgggcgcttcctcatgcatctgtggaaaaggcttctgagacttggaaaaaggtctctactgctgaaaacaggtttcatggtcacacaaactcacattccttgattttcacatgtgtctgccttggcggaagccgagcttggctgttcccactctggctagtgccttagggtgacagatgggcacgtcctctgggggagggaagggaagctgcccaggcaccagtgtggaccctgcactggccccgaagccttccagggaagagcagcctgaggtcccagtgtgcaaagctgcccttccccatcttcttgatcgtctaccaggagagggaacactgcctcaaatgtctgaagcctaacaaagacttcagaagactgggagtgaggctctcagcctgagggcacaccacgggaacgcgggaacgtgggaacgcaggctttggtgacatgtgttagaaaagcatttaataactggttaatctgtgcagctcgcgacccacactcacctccaggcatcacgaggccgacatcctgcacggtgagcacggacagcttctcttccgagtccacacgaatgaccccataggtcagtccatgcatggagaggacaccccggcccgggggctggttactgtcatccgtgggcctgtaatgacagtttttaacttgaatatgcaggagcagataagccatcacaatcacagatgtgcagtcagcacacatgcggcaggctgggcacctctgggcacagtgctggcaccccaggcacagtgctggctgcccatgtggctgcattaggggatgctcgttctgtttatgaacagctggcagcgagtctactgcttccgcctctacattcccagggaatcccaagaacacccgtaaactaccaacgcagctcctctcctgccccctctatgcaggccctgcacagaccagctctctctcccctccctccaggccctgcacagaccagctctctctttcctcccggctcctgctcactccacggtctgctcttctagttttgcaaatgtctggagggtggtgcatccactccaagaatgcagacaaaaccactgaacagcaatgatggaaatcctgactgtccagcctcaattcagatgcagactgcctgggcgtatgcccaattttataagaatctaaaataagatttacgctgtgccattgtggctgccaagttctaaggaaaactatttgggtggcaggcaagctgtagaatgcattgtgggtcaggagaagacgggtccgcataaggcagttttcagaagaccactgcgcacacgttcaccacgctggggcccaccccacctcctctgccggacaccccagcttgctcccgccttggggcttctgtgctggttctcgctgctacccaggacgttcctccggcagacgtccacacggccctctccctgtctccaggggacttcttgtcccctcagaaaacaccccccacccagtgtgcccaccccacagcacacacctctgactacctgtgcgacctcctccctcagacccaactctcccaagagcggccacagtttgttttgctcactgctgcatcccagccctggaaaatgtctagcaatgaatagctgctgactgaatttgcgaacaaataagttaaaatctaagatcacggattacattcctgaaaactaacaattcctcaacggttatctaagtgagtcaccacaatttaggtacacattgtttctgtaattttccatttataaatctttaacgcacttcagacctaaaagctggactataagttagctgtttaactttaaaatattatggtttataatgaaactgaagacataaatggggaaacataaaagttaatatttggaaaaggagatctcatttgaatgaagtaactggtgtattgaaaaaagcatgaaagactctggaaaaagaattattctagatgtaagaatcaaaaaggatagagctaaccagatataaaagaaaagtctccccaaataagaaaacccacacggaactacctagatagggcgagctcagatccccgggctttccattatcctcctggcctttaattcctagagaccccaaacaaatcaaaacttcaaaatgaaaacacaggtgttgtcagtggtcctgccaccatcccctcaccctgcaccatcccctcaccctgcaccatcccctcaccctgcaccatcccctcaccctacaagagtcctctacaaagatcagcgtggaagtcaggcactgtgagcttcagcatctgctgtgggttgaatcgtgtccccgcaaaagatcaccccttgtatctgtgagcttatttggatgcaggggctgttcagacacagatgcccctggacttacaacttgataaacccattgtaaaggcggaaattgaagttgagccaccgtaagccagggccatcttatgaccaggttaagatgaggtcatactgggttagaatggaccctaaatccaattactctgtccttgtaagagaaaagagaggtcctgacacagggagaagctcacgtgacgatggaggcagagactggagtgacaggtacccatccaggatagctgagcacccaaggctggggtgaggcccagggcggatcgctgagcagagcagcacccgagggaggctggggtgaggcctgggctgagctgagcagcacccgagggaggctggggtgaggcctgggctgagctgagcagcacccgagggaggctgcggtcaggcctggggtgggccccctcagcacgtccagacgcccagccctgtgacaccttggggtctccaactccagcctccagaagtgagacaagtttctgttgtttaaaccactcagtgtgtggtactttgttacgagagccggaatacgctatcttagtgataaaaatttaaggtacacttatttttgtttttaaaagccacatgaaagcaaaatgctaggctagccaagattgagaacactgacctgccgggcaagggccggaagggaaaaagttatctcagggcccaaaaacgtatgttttattgtctcaatcacaaaaaccccctttcctttttttttttttttttttgagacacagtttcactctgtcacccaggctgcagtgcaatggcgtgatcttggctcgctgcaacctctgcctcccggattcaagccattctcctgcctcagcctcctgaatagctgggactacaggcgccgccaccacagccagttaatttttttgctattagtagagacggggtttcaccatgtgggccaggctggcctcgaactcctgacctcgagtgatctgccctcctcggcttcccaaggtgttggaattacaggcgtgagctactgtgcctggccaagatcctcttttctatgtttaaacacagttaacgagaaataagacctgcacatttaataattgaatatgttaagattacaaattgtgtttgctataggaacttttcagttatgcttatacaatgatagttccaggaggctgaatatgttcatattagccacgttaaccttcattaatttaaccttccactgtacatttattcatatttgatagattcccttgctagtcggagaaaacgcacggccccgggattctttccttgcagatgtgcaagacactggcatacagccaggcacagaagcgcaggaggtcccgacacacagccaggcacagaagcgcaggaggtcccaacacacaggcgggcacagaagcacgggtgctcccgacacacaggtgggcacagaagcgcgggagctcccggcacacaggcaggcacagaagcgcgggtactcctgacacactggcagcctcacagccccacctccccacagacgtggtgtttggggccaccccttaacttctgacctggtggtgctgatgcctccccctccagatggcaaaccagtgccccaggggtaccctccgtgtgccaaatggttctgactctttcatgcatagggactcgcttaaaactcaccataagcctatggctattattcctcactttcagatgagaagattcgggcacagaaaggttgacttcactgcccaagtgggtggtggggctcggcaggactcagacccagagcatagcccctgctgacctgagtgcccgcccctccctggtctttgcctctgatcccaggacactgagtgaatcagtctactgctctcttctttttataaaaacttagaagcaaacagcacaaccaacgtcagcacattcttagtatgaacaaggcaaacatcacagtcaaaaggcaaagtccctgtttctgctccaatcctatgccccacaaataaccacatacagattttttaatgtcaaagtttagactcctagatatgcagttaagtataaaatatgtatgtataccaatacattgatttttaaaagaaaagcagaatcaagatgatgcttattctatgttggcagaaaagctgagtgttgggagaagctgcggcagggcttgcaggtctgacataatgtaagagtctcagaacatgtctggggtccacggtctaaaaccccttgtggtctttggaacaccaagctctgtgctaaagggtggaaggctgccctgacacaccataaactaagcccagggcataaaatccctcgtggcttggatagaatccagggcttgtggctctggaatgtgtctagacttgctggctccttgctctcccagggtcgattgtatcctgagttaaaagaacctgctctccattatctcaagcagaatatgttccacatgcttcaaagaaaatgctaaaccgtcacagctgtaagatcatgcgcttgccctttcaagccccacattctcaacacctgtttctttgtttgatcaccaataaatagtctgggcttccagagctcagggccttcgcagcctccatactcgcaatagccccccggatccaatttctctctcaaactgtcttttctcattcctttgactccaccatactttgtcaccccaacaacctggtgttggatctgatcaccccaacattctaaaactcactctcttcactaaacatatctgcagatctttccatgtgtctgtgtgtgggtgtgcatctgtgtaggtgtgtgcaccactgaattcagctggtttgttacacacagtgtttagtaatacaaatataagatcatatattttctttcattcaatttttatacagctggaaatgtatctgtaatatacatacctagaaagaaaatggagcatcacaaagcacatatacttaaatttttaagaagacctaaatatcctcccaaaataacatactttgcattcccactaacagaacaggagtattattttctcatctactagaaaagcacctcacactggctgtattgtgttgtggttatatatttaatgacctattctgcacagcaaccctgtggagatgggtgcagcaccatgaccctccctgtttagcagacaggggcaggggcgaggagggctgagtgctacccaaagccactgctgtggagtggagccagcgccaatctcagtctggcttcagaatctgtgcatctgaccacagcgccaagctgctcagcagtgcccatctctgcactcttgccaacacttaaaatgcttcccaatttgttcagtaaaacaccatttgttggtccaatttgtgttccctgtattattgagaaacttagatgatatttatctccatcaacaccttgctaagaagtaaaaatcccaagtaggtagatgaggtgaggaagggaagaaacagtccccataggcagaattcgagggggtttaaaaaacatccaccttaataatcaatatcagtacattaaaaaatggctaataaaggtatccgcccattcatcaacttccaaactcagttcccatgtgaaatggtgttcaagaccaaacagctttgtgtgtctcatgaagaatatggattccaggagggaccatctcagtgatctccaggaatgtaaggaggcagagtcctctcttggagatatggaaggagcaaaatacgtacctgtgtatacaataccacgatgacgtgcaaaagggaaacaaaataaaactaaaggacaacagagtctggatgttttgttgcctgcagatctcacgttgaaatgtgacgtccaacaatgcaggtgggcctgttctcgcagtaacacgagagttctcactttatgagttcacgtgggatctagttgtttagaatagagctgggcacctcctctctctctctcttgctcgctcaatctctcaccatgtgacatgcaggctcccactttgccttctgccatgatcataagcttcctgaggcctcaccaggagctgagtagatgctggagccatgcttctcttacagcctacagaactgtgagccaaaataaacctcttttccttatagattacccagtctcacacattcctttataacaatgcaaacacaccaacaaaaaggaaagaagcaggccagaccttgcaatgtggcctcacgaggaatgtacactatggcttccattgaaccatttgcaccactgacttgtcatagcatttccagcctctggaaagcattccataagccttgcccgcataacaccttgaagtagcagctcctataaatttcatgaacacatctgcagtttgctactcctgaccacaagcagagccaggccaggcttgggacattcacacaaaacaaacacatcaagtagtgaacaagcctcacagcctccagttctagggcttaacagagagccacactgcacctgcacagcttcagtgccgctcatcatttgctgaatcccttaagcaagtgagtcaacaaggtctttcattttttttatcttatacgggcgatctccaatgtagtattcctcagcttagcaacaacggcacatttagagaagaaagagttaagctgcaggcccctcctccccagcaatctttacacagcatttctatgcaacggaccacacacaaaacacgcctgcagtcatgtaacggcggtaacatttgttgaattcttactatgtaccaggcgtgctttcaagctctgtgtgtgtatgaacccactcaatgctcacacgggcctctgacgtagctaactgctgtgattctcatctacagacgaggaatcctcaaggtgaagccctgcccacatgacaaagcaggcgcgagagcagcgagatggggacccaggccgacctcggcccccgacagagccggcagggagaaggacccaggcccacctcggcccccgacggagccggcagggagaaggacccaggcccacctcggcccccgacggagccggcacagagcaagaatgaggtggtgctcatcccacacacgacgttccctgtgctggcgtcgaagcacctgcacaacgttgcttctttgggaacacgcattccggttccagacaaaatgcgaagttaccaggaagcctgtttgagagtggggttgggagggggggtcttcccttctgaactggcagccagaaccccgaggaagtgtctttttttttttttttttaaacagggcagctactctggtcttgaatcaccattcaccaccaaaggtttctcttttagatggacgtaaatcagccctgatgaaggtgccggggcagccacacaacgcacacagaacacagaacatctcctctgctttctttcctctctgggccactctttttcacagcagcagaatgaactaataaattcacagtactggtaaaaatgccctttaaaggacaggagcagttaagcttgtgaactcatttcagcagaaataatattttcaggaaacacgcaccgcgaggggaaattcagtgaaaaatgtgcatgtacctttttcgatgtttagcgtgacacagactttcaaaaacacaacagataagtgagattgcgatttttaataggaaaagatacaatgtaaaagcagccaatatattaagttatgagttgatttaatgtaatattcttccttttctctaacaggagcaatgcatgcccactaaaaacagcccattttacaagctgcacagcacggaaagtgagctgcccatctttactgcctcacccaccctgtgcagcgcagttttttttttttttttgcactgaatatactatttacagatacttaattttttgttaccaaaaacgggatcacactatataaacttttttacaaactctttctcataagccttggccacctttctatttccaggggaggttatgggctggaactgggggggaccccgtggggaggcccctcctctgccatcttcccgctgcacctcctttgccaaaaccaacttctcatcatctaattcaccacaaaacagaacacactgtaaaacgcacgtggttgggtgaaattaaacaggaaacttggtttgctattcgatgctacctaactctcatggtctgggtcacgtgattttcatctcgaaactactctgtagttagagaattgcaaaattttatccctctttttagataaaatgacacagtttatcttgcgttctcttacatgcgggattatggaactctgggtctgacttttccgagcagtgggaagtgctcacttcggatccactttggctcagggctgtgctgacgttttctccgctgtcactcatccaggcaccatcagcacccagtgggcatcagacagcacccttctccctgcggacacgtcttctttgatttttctcccagctaacttcgagcttggatactttcaaaaactagaagatggttgtggtgacaagggggtattttatcttttctggaattattgtttcattgttttatatgatttttgcattttcattactaaaatatcagggtatccaaatagtactttgtagttacaaagctaaaaattatgtttttcagttcaataaacatttcacaacgtagctttaagaaaatcaagtctatcatctacattctagagatggtaacagagtcagatggcaggagatttaggggatacttgtagccaggaaacagtttcctggttttcgccttgcaatttgtcctttaaaaaatgtctgatgagtttaggcaccacaagcccctatttccccaatatttttctactctaaaactaacatcgggagaaaagaaaacacaaaatataacaggacagtgacagttttaaagagaaaaaaatactttaaatgcctaggtgaaaatacagttcacgtagcaagactgagcagacttcactagagaacgtgatttcctgccaccacttggctgacacacatgaacacgaaggtgaaaacagacacacatgaaggcacacacatcaacacaaacacgaaaacaggcatacacaggtgaagacagacatgaaggcatgcatgcatgaacaggcatgcataaagacacgtgaacacaaacatgcctagacaaagacatgcatacatgtgaacacagacatgcataaagacacgtgaacacacatgcacaaagacacatgtgaacacatgcagacacgtgaacacaaacatgcagacatgtgaacgcagacatagacacacatgaacagacatgcataaagacacacgaacacagacatgcataaagacacacatgaacagatatgcctaggcacacatgaacagacatgcatacacacatgaacagatatgcacagacacgtgaacagacatgcataaagacacatgtgaacacatgcctagacacgtgaacacacatgcctagacacccatggacatgcataaagacacaaatgaacagacatgcacagatgtgaacagacatgcatagacacatgtgaacagacatgcctagacacacgtgaacacagacatgcataaagacacggacacagacatgcgtgaggacaggcgagtcaccagcccttgtcccttcaaagtctccgactcatgtttttaaagactctcaacctccctaaaatgagtgctggtcattcttttttggagactggcctttctgtgaggggagaaccaatggcataagctctggcagtgacctgcctgcagcgctgggcaacctgacagagggcacagcacctgcggcccaggcgccagcctgctcccacatacccatcgccagggctgctgctggctcccgagtgccacgccccccccccccccccccacaacccctgacagctgctgctggcttctgtacgccctgccccgctaccccaccccaaccccttccccatcactagggctgctgctgctcccggaagtgcccgtgcatcctgcgtatttatcaagcgggatactggaggttccattgatcctgtgagccccagaactttccgacatgctctgttttgcatgacagacattctatgttgcttgcaagagtgatatgaagatactccacagccagtgggctgtgggcatccctgtcagacctggggctcttgaaggccctggaccttgacgcctggaagactgactcatagcccagatgtccatgcttggccctgctggcacctgcagccactgggtggctttcttgtgagtgcctcagcttctgatttatctacttttttgttttcttttttgcagaagagaatcactaagtgatacatattccagagagggccaaaattctacaaatagtaagcaaatgcatctgcaattttatttgcattctactgcagataatcgttatcctttttaaattaagtggactgaaagccaagcaaccaaccagctgcaactcagcacctggaagttcagtctctgctttgataccaggagcaggggctgtccctggaagatggttaacacgcagaagaggctgtccctggaagatggttaacgtgcagaagaggctgtccctggatgatggttaacaggcagaaaaggctgtccctggaagatggttaacgtgcagaagaggatgtccctagaagatggttaacacgcagaagaggctgtccctggatgatggttaacgcacagaagaggctgtccctggaagatggttaacacgcagaagaggctgtccctggaagacggttaaagcgcagaagaggctgtccctggaagatggttaacgtgcagaagaggctgtccctggatgatggttaacgcacagaagaggctgtccctggaaaatggttaacgtgcagaagaggctctccctggatgatggttaagacgaagaagaggctgtccctggaagatggttaacgtgcagaagaggctgtccctggatgatggttaacacgcagaagaggctgtccctggaagatggttaacgtgcagaagaggctgtccctggaagatggttaacgcgcagaagaggctgtccctggatgatggttaatgcgcagaagaggctgtccctggatgatgtttaacacgcagaagaggctgtccctggatgatggttaacaggcagaagaggctgtccctggatgatggttaacacgcaggacacaaatgcttagatcacaacacagaggaaacggccatcctcgaacccatccaaacaggcataatccgtcctctacagacccttctctgcaacaaaacaggggaatgtagcagccgaacacttgtctttcttctttaaaaaacataaggagtaaataaaatgagatcgctgtactgcctcccacattggacgtgacgacctttaagaaggcattcattttgttctcatgccaaaacctacagggaagccttgccagacctcacttagtacagctttacggaatgtacgaaagccgtttttcacttaataacctggcctctgaccactcctacatgggaaattcacctcaagttttaagacagaatacacttgagttcacaggcactggctcattttccaaaaacacgcatctgtcccaacctttctgtggcacacaactgaaacccccgcacagagggaagtttcccttctgttcacacattcagaaaacaatgcagagagggatgtgttggtggaaacgcaagtacgagtgctgctttcatcaaatttattcaaaagtaacttaaacatcagggtaacgaaaggtacaggttctaaggaccagcattggcttctctcctaaagattttcaccactgagatagagttgctgcctaattcatctcaggaaattagggagtccaactgcaatggccaattatacagattattctttcttacagcatcagcactgaacggtttaaatatgcatcatatgcatgataacgacataaaaagacagtcttaatgagactgagtgatggaggggcagggagaaccggcatggggacactgcgggctgcttctagttttcaggacactgtcatttctaattcaacctggaatgctaaaattgtacctttaatccttttcggtccttcggtgtgttgagcccaatcacgccaatcagaaaagtggcacaccagagaagaccactgaagccagctccagggaggtggctctggagaggggctgctgtaacccatggtgggccgtgtccagagaccactcctccagacactgcacgggagcaggccgcagccgacctgacatgcgtgcccacgtgcaacaccaggcaagacagtgggagggagacacgtcctgctcttgttatttctgtctgtgtcctggtcaatgcctgcccttccacagttctgcctgcaataatttaaaaaccacacactgctctgggaagcctgttgcaagcaggtctcctgcactcactctacactccagagctcaccccacaggaaaggaatggtccttctcttccccaccactgggagtattgccgtggacatgctgccccaagagccccacaccacacctcctctctcttgccacaccttccctctggaccagccttggatgggccgttgacagccgacacaacttctctgcaggagcctgttctcctacaacagcatatttaggccgtcagtggcacctacgttgaccaaggaaaatgaaaacaaaaccccaaacccacagacggctccacttaggtaaaatgtcaagtgtgtgcgtatcacacaggaagaggtttgggctttacttctggtgcatgacatgagattgtcagagcaaagtgcactctgaatttacctactttaaatttcactttcattcactcaaaaaatatgtattaggcatcaactatacaccagagacagacaatgaaaaaataaatataccagtaaatcccacagcacatggaagtcggtaacactacaagaaaagcaggctgatgaaaacagaccctatcccaccccagaagaaaccagagattggtacacgcacatggaaattggagtaaattccaaggacacggtattacgattccatgcgcctctagacagttccacttattaaggaattaccgtgaaactgcagagagcgataaatgttttttaatgaatgaatctaggctgttcaaaagaatctgttccagcacataaaaacagaaataaactcatcttgaaaggttaggtcccgttttcaccctcaccctcagcatcaactgttaggatttcctgatctcccttcgctgctgaattaggactgtctctaggttatctacgtaaatcaacatgacccagtacctccggatggccacagtgagggcctctggcgagctggcacaaggacagatgacctcctgtcgaaggcctttactttggaagacattgagaaatgcatcgcaagaagaaatagaccctagagtgaaagagggacaatgatcagacagctgaagcactgtgattgattacaaaatcccaccatagaaaatagttccgaaggtgggattcaggcacaagtggatctaggcagcgtggaaaaatatttaatacaatttattatttatgttacactgaaagtggttattctcaaacagaactcaagaatttaaagaatgcaacctccacatttatgacaccttttctgacagatgaacttactttagtaacttttctgagacttgttccaccattttcagtacagaagttccaagacaggggtaaatctaaaccaaatgaagaaaactttcctctctattaatttaaatgatgaggtcgaggcacaattatcaagaacatatcagctaaactatctccaaatatagatatacttttctttatgcaagatgtattgttttgtacttatgggttaaaaccaattgttcattaaattagctcaggatttatgaaattctataagtgaagactgtttataaaacctgtttatgagtctgcttttgtatatcaggcattaaaggagtttatgctgctttagtttacaaacatgaacgttgcatgtttcataaatgtggtcagatacctttaatttcactttgcttctgaagctttatgtacttttttcacaaaagcatgctagctaggttcttgtttcagttggctgaaatatttctcaaggtgtatttatagtattctgtggagctgctaatttactttaactgggtatttttgttacaggatgtgataacgcaattacatttaaaacgacaaattaatttactgatcaagaaaactactatacaccaaaaagtactagcagtcaagtatttcttgaatatttccttattacctgcttagggcttacttcacttcatcctcatgaaaatttatgacttaagcaccgttttacagccggggaaacagggtcagcaaaggaactttctctacagaatcaagacatcctctgaatcccagggctgtggagtctacaaatgcctgtccttattatgccatcgtacctcttggcccgagtgagtgattactgtttggtgattttaagacaatttctttactaagataaggattagaaaaagaaaaatcaaagtgcaaagaatgaaacctggggaaaaaataaaaaagacttcacagcctgcctgcctcacgaaaaaaaaaaaaaaaagactccacagcccgcctgcctcacgagatcacacgctcctcacttacaggggttcgcgccgtccgccactatcagcattcgcagagaggagaggttgatgtctctctgatctctgtgtgctactaatgcccaatgcatatccctcgatttcacacacgccacttttgctaaaaagaaaaatagaaataagttaacatgtgccaccgtcagatcgtcccctattgcaaaagagagatcattgtgagtagtggggaagggtgaagaatcactggtcacccagcccccacaaaccttttttttttttttttttttttttttttgtgatcttggctcaccgcaacctccttctcctgggttcaagatttctcctgcctcaacctcccgagtagctgggattataggcatgcgccatcaggcctggctaatttttgtattattagtagaaacggggtttctccatattggcccgggtggtctggaactcctgacctcaggtgatccacctgctttggcctcctaaagcgctgggattacaggtgtgagccactgcgcccggcgagacccacctttgtactggcagaccttctggatccaggagagagggttcaccttcatcagcgagtacgggatgctgatcacatgcatcatgttcatgacgctctgcaatcaacaaaggaacacgcagggtgagcatggaggggcacgcagaggagcagctctcacccagtggcatggacactaggccgcacgggcaggggggagctctcagggagcgctgcagacaccatgcacacaggcccctggaggctcctcagggtggggctggcagggatggcaaatacagaggggcatagtggaggagcagctctcagtgagtgccatggacaccagactgcacaggcccccagggaaggaggaggagaagcagctctcagggagcgccgcggacaccaggctgcacgggccaggaggagcagcagttctcaaggagcaccacagacaccaggctgcaagggcccggaagagcagcaggtctcagagagtgccacggacaccaggctgcacgggccctgaggagaagcagctctcagggagcgccacggacaccaggctgcacgggctgggaggagaagcagctctcatggagcaccgtggacgccaggctgcacgggacccgaggatcagcagctctcagggagcaccacggacaccgggctgcacaggcctggaggaggagcggtcgcacaggaccctggaggctcctcagtgtgggaatggcagggatggctggtctgcatgaatgtgacacggtagggtctgggtgtaatcctttaaaacatgtccatgaaaagcgacttcccaaggtctccctcgaactccactgctttccctaaactactcctgacagaattaagtaatttaagtccaaatctttttaagacgaaacctttggtgaaacagatcgtcattttcaacagcctttcgtatcctcaaagcctaattcttcccggtgtgttatgctaacttttatttcacagaacccatcttgagaaccgcacactgctctgaatcgcagggctaggggaagctcggattctggctctggccgggccttgctgcggcagattactacttctgacaaaaataaactgggaaacactggctagtacctgcacgctgctgcacacagaggctgggactcacacctacaggggcggcagcaacacacctgcctcacaccgcagcagtcagaccaggcaccacctggcaggctgtgtggcgggctaggattcttgcagtcttgtaggctacggggtgggggcagacgagagggcagagacccctctgccactggctcgatttgggaagctccagatgaaagcaaaaaagcatgtgccttcactccccagagctctgccgactccccgccactctgctgggggaggtaagggtgtctcaaaagatgctgctgcctgctcagagacctcgctttagatgtgacagtggagagactcgcacctgccagggctgccagctgtaccccggagcacggagcaggcaggctggcaccaccagcgggagctcctcagagaggcggccccgcgacgaggcctcgaaagcagggctgtgtggacaacgtcacagccggaaagttgggtgttctaatgacgagagtgactaacggcaccagtgatgtagctgtctgttctttgggacctgatcattgaatcacatgcgtcaaacgtgtaggtggagtgagtgcttcaactttaggccacagaattctcacaccggccacgtcaaataggatcgtcgttccattcacagacagaaaaactgaggtttggatttgagaagggacttggacgcacgtctgacatgcctgagtcacaaagctaagaaaggaaaggctgagacacaagcccaggtcctccaatcccaaagcaggggctcccactgcaccagcacataacggtgctgggaacaagctgctccatcttatcccaggtccttcaatcccaaagcaggggctccccactgcaccagcacacagtggtgctgggaacacgctgctccatcttatcccccaacagcatccagacttgagagacgacctgtgtgtaacacggaaagaagccagccgggctgctctgcagccacagatatttggtctaggaaatgcttgccggctcctcttcacatgaattctggttcgccaagaaacggcgaatacaggaattcctgtattcatatgcccatcactcatgtgacaactcctagaattttctacctccaaaaggtaagaagcttcagcgtaagaaattattcaaaagaaaaatgagtgaaaattaccacatatgaaacagatggggggagcgtctaagcagtcatgctccacgtagcttttaagggccaggcccaccttaaacaaataacaaggctacttccccacgaaaagtgcccaagcccggcacgtcatccagggcactcgtgactgtgagacagtcgtttccctacaacacacacagactgccatcctcaagggcaaatctggaaactactttcccccgcagagtaacacaatagcaggccccaccgactcaacaaacagaaacatccagctaaccagatgtacgggacagtagcccacacacgaaccaacctttgacgttattctaagatactgaatgccaaaagtgcgggaagaaagataatgatctccacgtgagccctggaaggctgttttcggcagctgtaacctcaatccacgtgtccaagaccctcacaccagtggctgctgacacaactggctttgtggtgcagttgtgaaccacgttagtggacaacctcggtcttctaacagtgacgattttctgcttcacagtgtggcaggaagcagcttgcacaagtgaaacgtaggcaaatctaggcatttgtattcctacacccagcacactcctgtgtggacagacagtgaggggaggggactcctgtgtggacaggcagtgcgggcggcgggggggcgactcctgtgtggacagacagtgaggggaggggactcctgtgtggacaggcagggcggggtggggggcgactcctgtgtggacaggcagggtgggagggagactcctgtgtggacagacagtgtggggaggggactcctgtgtggacagacagtatggggagggggactcctgtgtggacaggcagggcagggtgggggactcctttgtggacagacacggccggggggacctcacttactgtcaggatgccatgccagagcccgacgtccttcttgaaatccagcacattcacaatggtttcagctgcacaacagagggagtcaggagatttttacttaggacagggcggcaacagatcaaaatgcaaacaaaatccaatattgcatcaggggaaataacagatcttgggaaaatatcattttgccgtatcttggtggaaattctgtagactccaagtaggccggtttgagtgccggccaccctggagtttctcgacagatatcctgacacatgagtgagcagcgttagctctccacactgcaccttaaaacgcagcgttccttctccttttatatatttccccctctctgcctttttctttaaaagatttcttttcacttcctcatgagtctcccaggaaaggaagctttgcagctggcatgccctctgcgcacagaggaggaagtggatttttggcaacacaggggcctacacagctctactgcaagtctccaaggttggagctgcaataaaaaaaggaggcactgcaatttggaagacggggaggacaatctattcaatgactatgggggagggctctaaaaaggtgctaaaagctcgtgcttgatgaggtttaccatcacagagcatgctggccctgaacagacctagctttctcccgaagtcacctggccagccaaggtcagcagctgcctgcaggtgactcagtctcacctccccttccaaaggctaaagtgtggaggataatagacaggaggctttcacaataaatggccaaaagtaaacaacctaagttccttttgaaagtagtgaagtaaagagcgaacgtatcattccctccccaacctccacaagcgtgaccaccctggaccttggaggcgcagggggcagtgcgtccccaggtgtgaaaactccatggccaaacatcagaatacccacgagacacacacgctgtttttaaaagggagattatgaggatgggcagataataaaaatagtagaaaaagaaaagtgtttcattccacagcggagcggcagatgccaccacggcttcgtgaagttccagaaagagacgccaggcaggggtgcacgccgcagcggtgccctgtcaggagcctggtcaaggggatgtcagggagcctcagggggtctccggagggggtctcaaggggccttggggcatcctaagggatctcagggacatgggggggttctctggagtctcaaggggcctcggggcatcccaagggatctcagggccacggggattctctgggggttctctggggtctcaaggggcctcgggccatcccaagggatctcaggggcatgggggttctctgggggttctctgaggtctcaaggggccttggggcatcccaagggatctcaggggcatgggggttctctggggtctcaaagggcctcagggcatcccaagggatctcaggggcatgggggttctcaaggggtctcaaagggcctcagggtacatcacaacgtctcagaacatctcaggaggtttcaggggatatcagcaggactcaggccaccaatggggggagtctctggggtccccggggtcgcaccctcccctctctgtgccatttcagtgtggttgccacagttccctccactcaagttccctccactcacttcccctctttgcctcccataccagcccacccgggggaaggaaaacacatcacgagcaccaatgcagagactctgactcaattgggagggtgggtggacacacaggcgttttctttacaactaaagatatgctcatgtgcacccagggatgaagctccacggcgttaacagcgtctccccagatccacatgctgaagcccaggccccggcgtggctgtgtggagagcgcacctttcaggaggtcctttgcattcagtggggtggtagggatgggttcctaactgcacatcttctcacacctcctacgagaaacctggaagagacccccactgggaactgcccaaggacacgctgacctcagacctccgcgctgtgcggacataaatgtctgctgttgaagccgcccagtctgtagtatttgctatggtaggctgagctgatatcctaactcaacaataagttcatgtcagcggagctgggcacaaacttcacgctatttctatggctcctcgtgggagtgatgtggccttcgtgtcaggtgtcccggttagaaccagggtcccaaggagtcagggtctggcaccccaccttccgtgtagccacacgcctgcgtcagggcctggcagtgtgtcagcagcgcagtcctcgtcaccgtcacacccagcacactgccatccttacacgtcttgtactgaaacgagacaaagcgtgagggaagtggggctgacaggtcacggcagtttttctggttacttgaggttctccaagtccctgaattttggcactcgtgtaaccgtcagaaacacacgttagtgccaaggccacactcagggccagtggaggaggccaaggctgactcacctcaatatacgcagtgtcgttattggcatctttaatgtgtgggaaccagtctcggggcggtttggagagatgtttagactctgtgacaaaccacagcagctttggccaaccttggaaataaacaacaagttccttttaaatgttactctgaaagtcggtctgtagaatttctccccatttatgtggtaccctttcaaacacgtcaactagatcgaatctctggtgtctccggacttcacgagatctaagacatcaacagaagagcacccaagccgccaccatgcgttacctcacgtcaccccacgggctggcaactcggctgtgtcatcagggacgagaacgcgtgaaaactcgtgggtctgtgactgacgtttcattccacagaggattgaaaccgaggcggggtgacgtattcccgcacccgtcttctgacaaaggacgtgggcatgcgagctctcggaggctcggtggcttacctttaaactgtgggatctctcccgttgggctttttggaagtcctttatggcaggcgtcactagtcaaggctacagtaactccacagcttccaagcaagaaacctatctgctggctccctgcgtcctgagagggcaacagagaggagttgagaatccacgacctgccccactccgcccagccttcggccctccctccagcgttcacacagaccctcgagtctgcagaaccaggatccaacccccagccctgctgcttggtatctgtgggaccctgaacaggtgagactgcatggcctcagtgtcctcacgtgtaaaacaggtatagaaagaacagctgtctcccaggtttgttgagggataaattagaagagggtgtggaaagtgctcagtgcaggctggcgttcagcgggtcgcgttaagagcctgctgttatagctctctccaattccataagactatgattatacaatgcaattactgtagagaatagacagggcctgaaaaaacacttctactaacatgctaacaccaagtgcctgatctttaaaacactcaaagaccaaaggcacgaaaggcacacctgtcatgggtgccaggcagggcacctcggccagaggaaggaagacctgggtcactttctcctcaccctgagcagcccagtctcaacgaactaactgaagcttgctgaaacaggccactgctgtgcagccccactggagacaccagatacaggtggctccaggctgccagctccggtttgggaaggtcagacctgaacagacctacgccagtcgtcactcctgtccagctgcccaaaggcaggtgggcgagcagccaaggcactcgcatcactctctctacgcccaccagctgtgccagctgtgtgggttttccattatttgattcataaaataaactgaaagctccaaaacagccagggttccaggacctaaaaatgccacattgtagtgagcaagtcaccgtcttcgctccccagatggctcagcatgaacccctcaattatggaccctacaaggcctggttgctgtcagtaatcagaggcctggctgtggatcttcccacctgttccctgataacaggaaaacatgagctgaagagtggtgttttcacctgggtaaattaggcagatttaaaatttcaaagctgtagtctcttaagtgtttagtacttttcttattgtagatttaaatctacagtgaaaacgcctctctgtggaattttcatggagcaacagccaaatgagccaaccagcacatgcagggcagctccccaagatctggccgccgggagctctgcggacagatggaacccacttcggggacatcttgtggtgcttttcacacagatgctgcttgctcaagtaaagccctaatcagtcactttaatgtgaatctgaacatcacattagcaaacgtcccgactcttgaagggacacaggtgaggggcagaggtggggcgacatcagcttctgcagcaggaaggcggctctgctgagccaggaagtgccgggccgaggcaggagaacacgcgtgactgtcacaagacggaggaacggctgaggccagtcgctcatggctgtgggtggaatgctgacctcaggccaggagccaacctttcgctaaaccctgccctggtagtgtccgcccgtgatttaatcccccaaatgataaaatcatacacataagaagatcccaaaaaataaggaagagactgaaaaccacaggagcagcaggcctgggaggatgcggctgctattcagccaaggtgaggctgggcctgctgctcctccgcacgtgtagagtgccccccgcggccccgtcagacgccagccctcagcacagctctgcccagccctggccagtgtgctcagaacagcacttaaccatgtctcaccctacacacccatgtgggaggcagcccagtggagtcttcaacacacatacgtgcccaggtacacacgcgcccaggtacacacgcgcacacactcacatacacacacacacacttaacactctcacacgcgcccatgcacacacgcggatgcgcacactcagcgcacacacacacacacgcccacgcacacacacgtccccacacaatacacagacactcaacactcacacacacgtgcccacacacaggcgcgcacacacactcaacaaagaaagggaccagacagatggaccctgcacacagcacctgaagcaaagggctgcgggtcctcagtgggcctcacgacctctgccggtgacccaaggacgggacccggctgcacctggactagtggctttcctgactcacaggcctcagtcctctgtccttggaaaggtggcgtcggcctcagtctggctggatctgaggccaactccgggaaacaggtgctacatctcaggaaagtgaataaaaagaatcctcccaggatgcattcagaaaactaggttctcatcagggtctttattcgaagacacttctagcggctgtaggactggcagatggaagcaatattaggattcacatacttaactacacgaatatgctcatctgacctcactttgacttgcaccatagccaacagattctttcagttaaaaataagaaaagttctctaagaccaataagctgctactttctaaaggcacacttctgaaaggatggcacccaaatggccaacaggtccatgaaaaggtgctccacatcactaatcatcagggaaacgcaaattaaaaccacagggaagccaggcgcgatggctcaggcctgtaatcccagcactttgggtggccacggcaggcagatcagtggaggtcaggagttcaagaccagcctggccagcatggctaaaccccaatctctactaaaaatataaagattagccaggtgccatggtacgcgcctgtaatcccagctactcaggaggctgaggcaggagaatagcttgaacccgggaagcggaggttgcagtgagcagagattgcgtcactgcactccagcctgggtgacagagcgagactccgtctcaaaaaaaaaaaaaaaaaagaaaaaaaaagaaaaagaaaaaggaaaaggaaaaaaaaaaaaaacaacccacaaggagacatcacctcacatttcttgcactggttacaacgtgtttatcaaaaagaggaaaaatacccgttgatgaggatgcagagaaaagaaaacccttgcacgctattggtgggaatgcaaattagcacagccattatggaaaatggtatggagatttctcaaaaacctaaatatagaactaccatatgatccagcaatcttgctactgggtattgggccaaaggaactgaaattgatcaggaatccagattatcggcatccctacattcactggagtgttatccacaagggtcaagaagacaaatcaaccacagtgcccaaagacccacgaatggatgcagagcaggcagagccggcacactgggcgctattcagccttcagcgaggagggaagccgggcctgtgctgaaccggaaggacattacgtcacacagtgggcgctattcagccttcagggaggagggaagcctgctctgtgctgaactggaaggacattatggcacacagtgggtgctattcagccttcagcgaggagggaaccctgccgtgtgctgaaccaggaggacattacatcacacagtgggtgctattcagccttcagcgaggagggaagtctgccgtgtgctgaaccggaaggacattatgccacacagtgggcgctattcagccttcagggaggagggaagcctgctctgtgctgaaccaaaggacattacgtcacatagtgggcgctattcagccttcagacaggagggaaggtgaccgtatgctgaacaggaaggacattatgccacacagtgggcgctattcagccttcagggaggagggaagcctgccacatgctgaaccggaaggacgctaggccacacagtgggcgctattcagccttcagggaggagggaagcctgccacatgctgaacaggaaggacgctaggccacacagtgggcgctattcagccttcagggaggagggaagcctgctctgtgctgaaccgaaggacattacctcacacagtgggcgctattcagccttcagacaggagggaaggtgaccgtatgctgaacaggaaggacactgtgccacacagtgggcactattcagccgtcagtgaggagggaagcctgccgtatgctgaaccaggacattaggctgccggaaataagccaggcacagaaagaccaaggctacatgagctcatttacacgtggcatttagcagtgaatagaatggtgaccacgagggctgggggggagggaggagttggggggagggaggagttgggggagggaggagatgggggggagggaggacatggggagatgttggtcagaagagacaaagcctcagattggaggaagaggttttgagatctattgcagagcagggtaactataataaatgaaaatgtaatctacatttcaaaataaccaagagtatattccaaatgtcttaccataaaaaatgagaggtaagcaaggtgacagatatgttaatcagtttgataaacattccacgtcgtatgcatatatcagaacatcacactctaccccataaatgtatataattataacttgtcagttaaaataatatttaaaaagtaaaatcaagtcacggtgtctttagacctgagaggctcggcctcaggggagggtctctgtacttcacctgtgaaatcacttgtggcttccctagcattctatcccatgaccactggttggcacagtaaaggtttctaaatgccttgttaaggtctgtgcgttctccacagctttctgcaaagcctgaggcatctgtaggcaaagtcacctcagggttatattggcacagagagggcaagacaggaatgtcagccctttcttctgagaggggttttggtgcttggtgataaaaccatagccacagagggcccctccctatgtcctggaggtgagggacaggcaggggatctttcctgtccccgtgtcctcatcacatgcacaggttacagtcactgacacgtaagtccccagggacctcccagcgtgagaagtcctggcctcctgaaatgtccccacactgttctcctgctatgctccctgccctcggaccacagagagtccccccgagatgcccctcatccccatgtggaccctgccctgtgcacagtgaacgtgcagcctctactcgggtacaaggggctctcagctgagggggactgttgggtcctcctgtgggagaggaaaactgtcctcttcctccatcatcactgccacagcttcccagccacgtggccttggaaagatttctgatttgttcaaaacgtacggtttatgtctctactaccattcaaaggtacttaattcattatttcaaagcatcttaaatgtgttacagtgaaacgtttcatggctgaaataaatgccaccttggtatttggagctatgcctaggatttgagataataggatggcatttctgccaacctgagagcagcactccaacatgctcaggaaaaccacctcccccctttatccaaatcattttcctctacaaaccagcctggactggaggacaccaggctatacactttaacatggataaatacaaattattaaagtgaagaaaagaataattgttacgaataacaatgataaatgttttgtgtctggttattgaaccatcaccatatgctcatgcctacaagttcctgcaaatcatcatttcactgtcgcttagagacctcagagcatgtccagagagcccctaaccatggacatgaacatcagctgaagagaagccttgtaaactcctcactagatcccaggactggggttaactatagtactgaggctgtcatgtaagcatgactggagtcctccagtccttccacttttctcacctgttgtgaagaccatgggacccaggggatgagaaagcacctcacgggaagtctgagctgtctgatgcacacgtggagtgctggctgcaaatccggtgggggggggggaaactggctgcaaatccggtgggggggaaactggcattctcccatagcagctaccacagactcccctgcctctgccagacacgagcatactcaggaggccaagcatgaacctcctggctttgtacataggaaatgaaaatagcaatcatctttcctgtttccaaaaggaaccccgtgttctctcccttcccatccaaggggaagtttgaaatgcaaccatgtaactggcacagactctgaagagatacccacgtggcagatggttttcttaaatattgagtcaacaaactttaatgctggagtagccacaaagacagctgaagtttctttgcctgggctacctgtgattgttgccttttagagctggaagagtcacccacactgtgcacacattaaagatgtgctaaaggggccaggcgcagtggctcacacctgtcattccagccctgtgggaggccgaggtgggcagatcacctgaggtcaggagttcgagaccagcctggccaacgtaacaaaacctcatctctactaaaaatacaaaaattagccgggtgtggtggcacacgcctgtaatctcagctactcaggaggctgagggaggagaatcgcttgaacccgaggggcagaggttgcagtgagctgaaatcgtgccactgcactccagcctgggagacacagcgactccatctcaaaaaaaaaaaaaaaagtgctgaagggagctgatggtttaagggcagtgtgcacaggcacattgcaggttcagacctgggcagtcccttggggcgcgtgctgctggcttcctcctacacgactggccgcctacagggagcagcagcgtgacctgcactgcagccgccccacttcatgtctcttacagttaccgtaactgctttacagaagaacaaaccatccacatggactaaaaccttacattggtatgagcgtaagccaaaaataaaattctaagcccctcaaccaactgaagagacctcttccctcagccaaggacattccaaagttaacctgaaaaaccagttcagccatgatgggaaggaggggtcggacatgccccccttactccctcatcctctgtttgaaattcagacacagttgaccagcaatggcattaaaacagacacctccagactgacaaagctgactctctggagcaataagataccaacatgacaaatagcaggccctgaaagaaatcgaagtattttacctcaaaatatatttctttgacatagtttgaaatagccctataaagctctctcttgtggggaaaatctacattctgtagacaatctccttccctttccaggtccttttcctgatccaggggagaattaactaagagtctggcacatttttaagtctgataagaaccatttacacctattctctctgaagcctgctgcctggaggcttcctccacataataaaatccttggtctccacaaccccgaaccctaagacactggcttctattgatttcagggctttagataaactctttcaaccaactgccaatcagaaaatcttagaatccacctgtgacctggaaggcccccactgcggcttcaagctgtcccacctttctagaccaaatgaacatatgtcttacatgtattgcctaatgtctcatgtgtccctaaaatgtacgaacccaaaagctgcagccggaccaccctgggcacacgttctcaggacctcctgaggctgtggcatggccacgtcctcaaccttggcaaaataaaattctaaattgaaacctgtctcaaatactttttgattgacaacgcacattaatttctttacattggattaaacaataattacaatggcaagtttagtagcttattttcattatagaataaaacctgacaaatcataggtcaaccttggactggatgtcaaaacacctgaacaaaagcagcatccaccacccttcaaaataataattaaaaaaaaactatcatttaccccaattctagtgcacatgacaccaaggaacaagattctcaaacacccttgctttactgaccaagaggctgctgatccacgtttgaccccaaagcaagctgtgctccacctccaggacgcccatcccaggctgcagggcccactagcgaccgcatcccttatcgaggcaaccgaaggaaacccagggccccagaaacagcgaggagaccctcacccagccgggatacagccaccgtgaaagccatctcactcagcgagaaaccgagcaaagggcgcattccttaccttcctggtgagcggcacctcgatgggcacggggaccacctcggccagcaggcagccgtagaaagccgccatgaaggcagccggatcattgttggggaacaccagtgccacctgtgggacaggccagagcgggtcagcattaacgtggggtcctggcttcctaagacgccacggaagagcttggttctaggtgagagggcacgcttcagtgagaaccagatcctatgtaaaatgcatttcagtaagctgtgttttaataagcatcacacacccggccttgaattcatatagaagacaaacgtgaacagtcgtctatgatactgtcaccagagtacaactgcctttattttctgcatactaccttccatacccacacgtttccacatagatgaagttatatcctactgtttctcactaagctttgtaaatacttccttgtatttctatacagtcttcataactgtcctgggacagcatgtgcaggactcagctcagatcccatggcagtgtttggctctgggatctcaggcacaattgtggcctctctgagccttagtgttcttctctgaaaagtgagaataatgatagagctgatgtcttaatgcggtggtcaaggtcaaatgagagaatgcacatagagaactcagtgggctgcttcacacatggcgtgagttcgtggaggctgactatgagtaaagcccaagttactggcactagggctggtggcagcatcagtcccctggtgccacacacgtgcatgtgttgtgggccctggccctgcagcagtcttccctgtgtagctgcctggatgtggcaccaacccatcctgccagctcagcctctcttaagaactaagttcctaagagtagaattatcagagttctaaaagtgtggttaatgtaaattaccaagtaatattggtacctactaatagatattatgattttttttctaaagaaacaagttcactctattacccaggctggagtgcagtggcacaatcatagctcactgcagccttgaactcctgggctccagtgatcctcctgccttacaggtgagcactactgcatgcagctaatttttaaaaaatatctttagatggggtctcgttatgttgcccaggctggcctcaaactcctggcctcaagcgattctcctgccttggtccccgcaaagtgttgggattacagatgtgagccactgttgcctggccagtatgttttctgatggtccttaacagtatggtgtatcttgacgaagaacaattttccttcgatgatagagtgttaatagacaaccctatttctggattcccactaagccctgtgaactctgcttctattttaacacaggttacttgtacatgtggggtagcattagcgttactcttccttctggacaagtttggtacattttcatcagcacatgaatcctgtgattttacacgtgtggtagcattagcattactcttccttatggacaagtttggtacgtgttcatcagcacatgaatcctgtgattttacatgtggggtagcattagcattactcttccttatggacaagtttggtatgtgttcatcagcacatgaatcctgtgattttacacgtgtggtagcattagcattactcttctttatggacaagtttggtaatcctgtgattttacacgtgtggtagcattagcattactcttccttatgaacaagtttggtatgtgttcctcaccacatgaatcctgtgattttacacgtgtggcagcattagcattactcttccttatggacaagtttggtacattttcatcagtacatgaatcctatgattttacacgtgtggcagcattagcattactcttccttatggacaagtttggtatgtgttcatcagcacatgaatcctgtgattttacacgtgtggtagcattagcattactcttccttatggacaagtttggtatgtgttcatcagcacatgaatcctgtgattttacacgtgtggtagcattagcattactcttccttatggacaagtttggtatgtgttcatcagcacatgaatcctgtgattttacatgtgtggtagcattagcattactcttccttatggacaagtttggtacattttcatcagcccatgaatcctatgattttacatgtggggtagcattagcattactcttccttacggacaagtttggtatgtgttcatcagcacatgaatcctatgattttacatgtgtggtagcattagcattactcttccttatggacaagtttcgtacattttcatcagcacatgaatcctgtgattttacatgtgtggtagcattagcgttactattccttatggacaagtttcgtatgtgttcatcagcacatgaatcctgtgattttacatgtgtggtagcattagcattactcttccttatggacaagtttggtacattttcatcagcacatgaatcctattttacatgtgtggtagcattagcattactcttccttatggacaagtttggtacattttcatcagcacatgaatcctatgattttacatgtgtggtagcattagcattactcttccttatggacaagtttggtatgtgttcctcagcacatgaatcctgtgattttacacgtgtggcagcattagcattactcttccttatggacaagtttggtacattttcatcagcacatgaatcctatgattttacacgtgtggcagcattagcattactcttccttatggacaagtttggtacattttcatcagcacatgaatcctgtgattttacacgtgtggtagcattagcgttactcttccttatggacaagtttggtatgtgttcctcagcacataaatcctgtgattttacatgtgtggtagcattagcattactcttccttatggacaagtttggtatgtgttcatcagcacatgaatcctgtgattttacatgtgtggtagcattagcattactcttccttatggacaagtttggtacgttttcatcagcacatgaatcctgtgattttacatgtgtggtagcattagcattactcttccttatggacaagtttggtacattttcatcagcacatgaatcctgtgattttacacgtgtggtagcattagcattactcttccttatggacaagtttggtatgtgttcatcagcacatgaatcatgtgattttacatgtgtggtagcattagcattactcttccttatggacaagtttggtacgttttcatcagcacatgaatcctgtgattttacacgtgtggtagcattagcattactcttccttatggacaagtttggtatgtgttcatcagcacatgaatcctgtgattttacacgtgtggtagcattagcattactcttccttatggacaagtttggtatgtgttcctcagcacatgaatcctgtgattttacatgtgtggtagcattagcattactcttccttatggacaagtttggtacattttcatcagcacatgaatcctatgattttacatgagtggtagcattagcattactcttccttatggacaagtttggtatgtgttcatcagcacatgaatcctatgattttacatgtgtggtagcattagcattactcttccttatggacaagtttggtatgtgttcctcagcacatgaatcctgtgattttacatgtgtggtagcattagcattactcttccttatggacaagtttggtatgtgttcatcagcacatgaatcctgtgattttacatgtgtggtagcattagcattactcttccttatggacaagtttggtacattttcatcagcacatgaatcctgtgattttacatgtgtggtagcattagcattactcttccttatggacaagtttggtacattttcatcagcacatgaatcctgtgattttacacatgtggtagcattagcattactcttccttatggacaagtttggtatgtgttcctcagcacatgaatcctgtgattttacatgtgtggtagcattagcattactcttccttatggacaagtttggtacattttcatcagcacatgaatcctatgattttacatgagtggtagcattagcattactcttccttatggacaagtttggtatgtgttcagcacatgaatcctatgattttacatgtgtggtagcattagcattactcttccttatggacaagtttggtatgtgttcctcagcacatgaatcctgtgattttacatgtgtggtagcattagcattactcttccttatggacaagtttggtatgtgttcatcagcacatgaatcctgtgattttacatgtgtggtagcattagcattactcttccttatggacaagtttggtacgttttcatcagcacatgaatcctgtgattttacacgtgtggtagcattagcattactcttccttatggacaagtttggtatgtgttcatcagcacatgaatcctgtgattttacatgtgtggtagcattagcattactcttccttatggacaagtttggtatgtgttcatcagcacatgaatcctgtgattttacacgtgtggtagcattagcattactcttccttatggacaagtttggtacattttcatcagcccatgaatcctgtgattctacatgtgtggtagtattagcattactcttccttatggacaagtttggtacgttttcatcagcacatgaatcctgtgattttacacgtgtggtggcattagcattactcttccttatggacaagtttggtatgtgttcctcagcacatgaatcctgtgattttacacgtgtggtggcattagcattactcttccttatggacaagtttggtatgtgttcctcagcacatgaatcctatgattttacatgtgtggtagcattagcattactcttccttatggacaagtttggtacattttcatcagcacatgaatcctatgattttacatgtgtggtagcattagcattactcttccttatggacaagtttggtatgtgttcatcagcacgtgaatcctatgatttagcacatgtgcatcatttttgcattacttcattctggattttttttttttttttgagacagagtcttgttgtgtcacccaggctggagtacagtagtgcaatctcggctcactgcaacctctgcttccccggttcaagcgattctcttgcctcagcctcccgaatagctaggactataggcatgcaccaccacactcagccaatttttttctattttttgtagatacagggtttcaccatgttggccaggctggtctcaatctcttgacctagtcatctgcccacctcagcctctcgaagtgctgggattccaggcatgagtcaccgcaccaggcctcattcttgaagttaaacaattttttatgaaaaatgtcctaactggaagtaatttcatcacgaacagttttagacaaacatcctaatcatctgtgtatctaagtaagcaggctgacataaaagcatccagatggtcattgagaggggagcaggccatgctggaaaggtcggaatgcaggatcactggcagacacaaaattaagttgtagattctatgaatatatgaatatttcctttctgtatggaatttctatagtccactacaatttgctaagagagattagaaagggaataaaattatttgtacatctatgcggataagccacaaccaattatttcttcaaactatccgaggtttacactaggcatgagtgtcatgtgacggactgagagctgatggcatgtttttcagatcttgatatggtgaacaaacagtattcagttaaatgtttgtaagatttccacattaccactgctgtacaacttcttcccctaaggcggaccaaaaaacaccaggaaacgttagaaaattcagatgttgaagttccatccaaaactgatggttgcacccattcatgagaacatgttcagttctgacttgttaatcttcccagaataccagctctggaggcagagtcttcaccaagggcagacagctgagacggagaggatgcgtgtcatccccacggccagacggcgatcagccctctcccgagaagcacctcgtgtctgcctcctctcccagctcctgttgcctctgctcaaaggaagttcttctttatcaggggtttaaaattctcactgatttatcactagagttaatgctgaaaatttcatattatagaccactgcagagttgtactgaaatgtggtataacaaagttaataaaagcagaatataaaattgtacattattgtacacacacaacaatacaagtaatggatagaaaagggtaaaatacttaaaggctcttttagcatcaaaactgaaaatttttttgcaatttgttttaaggaagagaacgttgtacttacatcatttttgttaggcattccttcagtatttgaatcagtcacaaatcctgttgtattgctacctccatagtgatcccaatacaatactggacaaatacaaagacgctcgatttttgtaaacccacatggcttccctccgttcaatcctctgtgtacttctttgatacttcactgtacctaattattcacacagcaggcatcagccgatcaggagacgcacactcaactcttcaggggagcaaaggcctttccggctgaaggattcccagctcccctccagggctcctcacacagccggccctgctgtccaggcgaaaggcttcagcaccttccacgctacttcctggaacccgcccaagagctaccggctcatcttttctcctcgagagcccttctcagataatctttcctcagaaaaattttagaaaagtagcgccttcacccctgacccaaccaagccaaaccaatccctgcccaaaataagcctctttacatatttcatcaaaccgtgctcccgtatctctactgacatcttagaggaacacaggagtttattttgtgattattatcatatggaaacttcaagtatctggaggccatactatgaaagaatttttaaaacaactcttaagactacaaaccacattacagataaaggagctattccattacaattaacgtttcattatgtggtaacacaaaatttacgattctaacaatttttacacgtagaattcagtagcatgaagcacaatcacaaggttatacaactgccaccaccagccatctctagaactttctcatcttcccaaatggaaactctgtccctattaaacacgaactttgcattcctctcccccagtccctggcacctaacctttctgcttttgtttctctacagctggactactctagggatgtcatgaaaccactcttgtgaaaatgataactgaggaaattatgacactgaaagggatcagacctaaccaactccatcttgcttctaacctttaagctgtcccttgttcaatcctgggtggagaacaaactaaccttgggaaggaattcagttcatagtttgactctgaaacaaaactggtaatagccctttcccgaaattacccctttcttgcttggggaccagtctgcctttgtaggactaacaaattagctacaagattagaaattactgcatgaccctaaaggggtcatgcagcctctggctccaacagtctgaatctccccagattgctcctggggataacatcactatcataaaacctaagatcagtgctggaggtattctgcagaccctgcactggatggagcagctgacaccacccagacaggtcatctggctcaaccagttctgcgaacccacccaggaacagaagacagcaggaaaaactcagttcgaccccctacgatcccatctccaacctgaccaatcagcactccccacttcccaagccctcacccgccaagttatccttaaaaactctgaacgatcctcaaacacttggggagaccgatttgagaaataatagaactccagtctcccgcacagccagctctgcgtgaatcactttctccattgcaatccccgtctagacaaatcggctctggccaggcagcgggcaaggtgaactgttgggtagttacgctcgcaggaacggaatcacgcaatacctgttttgtgtctggcttactttactaggcatagtatctgcaaggttcatccatgtgttatgtgtcagaacttcctcccttctaatgggaaatccacatctagtccgtggatttggggttgcttccaccatttggttgtgtgagtcggctgctatgagcctgagtgtactcatctctctcctagactctgttttcaatccttttgggtacacaccccgaagcagaactgctggatcacacagtaattccatgtttaattctttgagggactgtcacgtttttcggagaggctgcaccattttacactgtcaccagcaatgcgcaagggttccgacttccccacatccttgccaacacgtgcccttttcagtagtttagtaattgccgtgcttctcggtgtaaagcagcatttcactgaggttttgctttgcttttccctgatcaaggatgctgagcatcttttcatgtgtttatcggccactgctaaatctttggagaaacgtttactcaagtctctggcccatttaaacgtttttgttgttgttgctttttttggtggtggtgacttgtaggaattctttaaatattttagatattaatctctgttggcaaataatttgcattttctcccattctgtaggtggccttttcactctcttgatagtactctttgatatacaaacatgtttaatgtaaatgtccaatttatttattttccttttgttgcctgtggttcgggtgccacatccaagaaactgttgccaaatccagggtcatgaggtgtcttctctatattttcttctaaggcattttctttatgttttcttctaggttttggctttagctcttacatttaggcgtttggtccattttgaatgaattttttgcatatgatgttaggtaaacatccgccttcattctcttgcaggtggatgtccagttttcccagcactgtgtgttggaaaggctgtcctttccccgttgagtatcttggcacctgtggaaatcacttatccatatacatgagggtttatctctgggccctttattctgttccactggtgtatgtgtctgtctctaagccagtaccacattgttgtgattattataagctttgtagtaaattttacgatcaggaaatatgacacctacaatttacttttaaaagaggccaaacgtgttcaataaaaaatgggaaagaatcccaggccacggtctcctggagctgctgcaatctgttgaacatgcccacagcagactcatgcctttatagtattgcttaagtaatcaaagctcatgctcttgttggtttatggagctctaaatgatgtctttatgtaattcacttggagtcctttaggtaggataacctaatcttgggggcatctaaagcacataggtaaaaaggctctacacataaatgcaagaaaaccagcttctataccaagctccacatctaaactggggcataaagcatggacaagaccattacctgctcaggatgtaatgttagaatggagacaccattaatagtatctgtcctgtgtaacttaccaggtagcagttaagaataaaaacttgctttccaatagaaagtggaggtggcgctgaactctgtaatgtttaaacagtgggcaccttttcccacaggactcttgtgttttgtagatccagcagtttaagttgcacttaccctatctccaggccggaccatgggttcctgctttgtgcctaatttgtgtagaatgctgtaagcgaccttcatacttcttgtccacagcttgcctatgaatacaaatcacagacaaatgtgcgtattaaaccatacggagagcacagcttctgcaagtcaaagtctaggacatgagtccattctgcttcctgcgtatcatggtctgcaagcgacttgaagtgggggcagctgagcaaagggggaactggtaggcaagaatggaaaatgagtgaaagtagaaaagcatcagggattctaaagacaaaacttcaggagagagaatgaaaataaaaaagctaaaaccaagtgttggcctgtcttctgatctgtctgtgatgtgggggtggcgagggggggcgcggacagtgcacacaccgtcgtcacagggctgggatctgcccagctgaaatgacaccatcagggagcgggagggccctgagaaccttctcctagcagatcaaagcttcaaactcatcctgagtccctggagtcaagaggagtaaaagcaatgactccaacagtcagagctgcctggacactggaacaaggccggcacaaaacaaatcccctcttagtgcatgaagtgcctgcagcaaggtcagcacagaaaccgcggggaaggttgtagggaggaaagtcctctggggccaccgcaacggtgtcactgccacaaagtcactcccggtgacgtccctcatccacagccggtctcacgtgaatgtgagcaacacagagcagaaaactgcctcgagaggctccaaactcacaagccctgtgtttctcaccttcaaactttcctaacctcagggttttagggtttttaatcacaatccttggattcagataaagataatggtaaatgtaacagtctgagatcaaataacaatgactttaaagcctaaaatgagttcttaaatacacaatggccttttacaacctagtctcagaggcttcagctgccagagcgtctcagtagtcaaggtgttagaagacgtgataatgctgtaatagtgtaataaaggtaacagctatcttaactgttttctatttcagtaccatcactgttttaatcttttccctcttttaaatccaaacactaaatcagattttgtcgtttacaacacagtgcaaattaaaacaccctgaattaatttcatatcagaatgagagttccttagattagtgttattattatttatctaccacagtatttatccccttgctaatgagaacgtgaagagaatgattatctttgattgttctggttcctaggacacttcccggtcatactacgtgctcagcaaatgtttcttcattttactgatgtcgcaggcaagctgtaataaaatacaaagttacggtgtgcattctagcatattcttgagcacttaattgctagacacacatttattcatgttccctcctcctgtcttccttagctcctcatcctcaacaccataggcagtcttcaagacgggcagctttacagtcatctggaattctattaggggattttattttcctggaaaagatcactggctcattagatataattcagggagtattttttccccaacaaaaacaattattttgtggcttcagatttctttaatgtgaacaagattagggaactattatagttgggtaaaacaattacaatcaattctttgcaactgaaagaaaaacaatgtgttgtaactgaataaatcaattacactcaattagcaccattctagtttgtgaaagtttcaacttcattctcagctaagagtcttgacatcctaagttcatacacaagctagttaacaatagagagtttgataaaacacatgcaaacttttggaaaaattcttgaaatatatttggtatttttatacttctcaaagagaaaaggcaggaagttaagctgctgatataaagatacagcagttcttaactgattcataaaggagatgtgtgtgatgtcagcactattgtattagatattaattgtaatttcgcttggctttgactgaggaacaggcaactgaacagagtgtaactggtgaggggagaggcggtgggtggcgaagggctgaaccggagcaagcccgggaaggaggcgggagcttgagagagacaccatcaaccacgcaaaaaagcagcaaggccacagaaaggtggcccagcgtgctgctagctcaagcatgtagatttcttgaaacatctggagtaaaaggaaaaccataaataaaacgttaaaagggagatgagcatgagcatctccttggtaggaaagccagatgaacgtataggtctctccagaaatccacagaggaggcagaggaagagcgtaccagagagctgctgtgaggcaggacgtgaagggaaattaacagcacagcgtgacttatttttattaagattatgaaatgccacgggtagtctaaagtggaaaacagaatgatgttttacaagtttattcagttgtggctttcattagccacctacactttctgttactgatcccaagtttatccgctgggaattctgctaccccagcgcttcgtaggaagctaaatttgggggttgaggggaaacggcaggactttagagaatacagccccttcagttacaccaagttactcagtattagaacaattctcattcgataccaaattactcagtattagaacaattctcattcgataccaaattactcagtatttgaacaattctcattcgataccaaattactcagtattagaacaattctcattcgataccaaatcactcagtattagaacaattctcattcgacgagcttgtttctgactcatcgtagcaacacccagtcatgcgttcatctacgttagcgtttctacgcagatggcgctttccagtgttcactgcgttttcatctgataagctgtaatcttaaatttggaaatgtgttgctttcttacattcctttaacaagtaaaaaccaagatcaacccacagcctgcaattaaaatggataattaaaatacaacatatagatgattaaaatacaacatataaaggagttaaaatgctttggttgtgggcatgagttctgaagaatccaacttttcatatgaatattcagtctgtgtcttacgtctcccattcatcttaaccttgcaggaaggggaaagacaccaaccctgttcaaagttccagcagcagagagtggcgatccttctgatcgacatcagaagccccgtgagaactgtgtcttattgtctttgatttcccaaagcttagttctgtgccaatgcatactgcatgcttaaaacacccaagtgaacgtctattagttctcagagtgaacacatgcacccgaacagttcggctgctcctggaattccccgcatgtaggcggggaggcctcagaggccatcagctgtcatgcagcagcgactccaagtacacaattagctccagggctgaatttggccggagatgagggtcacatagaaaagtctttcatgcttttgactcaataaaacctatttctgagagcataattaaaaaaataaagtttatgcttcatcatggatgccacacactgtccatttaaaactactcaatgaagccataaaagcaaaggggctacgaaacgcacgctcccaaacccaatatgctcctaggcccaaatcccacatctgtcctgagatgcacaggttgacagctgctgcctcccagagccccaccctgaaaggctagggtctgaggttccacggttcaacatagcatctggcttttgacctccatggctaatgtagaaatcaattcctttcctacctgcaatcagaaaagtgttgtaacaacaaaagctaaagttaaaaacaaaacctgccaactgacaacaggcggaactatgtactgtactatcccaagagtctagaactgaaacagctatgtttaaaatttcagctatcaacataaatctcagacatgcagacacaatatgaaccattttggtccttcagttattttcgtatcttttgaaaattctaactgattaattttttagagatggggtcttgctctgtcactgaggctggagtgctgtgacacaatcatagctcaatgcagcctcgacctcctcctcctgcctcagctcccaagcagctgggactacaggcatgagccatcatgccagccttttagttactactttctttgtaaagctgaagcagacagaaaatagcctgacaatctgcccctccatggcctcttatccacagaaaaaagagaaacgcacttctctgctaccgttaaccatgtgcaaaaagcttacagactgtattaattgtactgaagacttaagggaaaggcggtttctctggccttctgaaaaagtcccttggaaaccgattttgatttttctgagtgatacataccagaaagtttagatagacattttttctaactaccaatctttgctgaaagcatgcatttcaataaatcacacatgtatttaagatctaacatcttattagagctatggtcactgcttcaagcagccatttctggttttaactcaaaaaatatttaacaaataactttttatattgaaatcaaatagttttcctaaagagtttcttgagattccatttatttctgtgcggaaacataaggcagcacaaaatcaatcagtcaccagaagtaacagacactgagctttgtgtgtttgggagtggctgcgcgagggggtgggcaaagggcagagggtaaacctccggattaccttaagtgaggatttaaacagacactgagcttcgtgcgttcgggagtggctgcgcgagggcgtgggcaaagggcagagggttagcctcgggattaccttaagtgaggatgtaaacggacactgagtttcctgcgttcgggagtggctgtgcgagggggtgggcaaagggcagagagtgagcctggggattaccgtaagtgaggatgtagaggggcttcccgttggtgtccatggtggtcaggcagggcgccttgggcgagatggtgccccacctctgcagtgcggcctccagcgacggcggccagttcgtgaccacgcccagctgctctccgcgcatggccagcatctgggccccctccggctttggttggttcggatccggttgttgaactaaatcgtttgaatacaagaggttacaagagaaatgcatccacattagcatggctactttttattctttataaagaagccaagagatttatacttaagctgtacatttattagctgacagaaaagcatgcttttctagaattggggtctatacactagcatcacggatgctggtaaaaaattagttcttgtaatttccaaggcagcatgtgggtagagcgcttaggtggacctgcacacagctgcaaactgataacaggtggaaactgcgctgcacactgtgcccagaggctggaattcaaacagccatgctgaaatttccattaccaacatcagctagtgattttggaccccaaattgcttaaatcttgctaaattatattttgtcctgaaagattaatgataaatatattttctgaggcagggtctctctcttttgccttggctggagtgcagtggcatgatcacagttccctgcagcctcgacctcccaggctcaggttatcctcccacttcagcctctgctacagtcctagcctgtagctaggactacaggcatgcaccaccacgcccagctaattttagagtgtgtatgtatgtgtgtgtgtgtgtgtgtgtgtgtgtgtgtgtacatatatatatatataatgtgtatatatataatgtgtatatatatataaaatgtatatatattttgtagagacaggtttgggcaatatatatatacacacacatatatatttgtgtgtgtgtgtgtgtgtgtgtgtgtgtgtgtgtgtgtatatatatatatatatttttttttttttttggtagagacagggttttgccatattgcccaggctggtctcgaactcccaggctcaagtgatctgcctactttgacctccaacagtgctggaattataggcatgagccaccgcacctggcctgagctgtacatttaaatctgctacaagtactctgaataacaggaacacggagtgagtattttcctgagtaaaactaaaatcagtgcatcataaataccacctgcccaatccttgagagaggtgaagaatggaaattatctcttccatttctggaacagacttgtctgtcactttatgactgacaaaatcagtcgtttctacttgtggtttaacacataagatactaaggagctcaagtttgctacaatgagcagttcttgtgctttatttcaactttaagttgtttgtctaaaaagacccaggagcattcaggggcaaaggcagcagctccggcacctataaggagaggcagcaggaggagggaggagacagcacttcacacgccagttttgctgccagcgaaggatttccccagtttacttgtttttctacatgtttatactttacttgtatttctatactcttacagagttcttagagagagacctgacctgggtcacagaacaaaatcaactcccacagaggacgactaacaaccaggtttagagacctgccgacaccaaggctgcctgggaacatcacccgctccctacctgggttcccatcatgcggcaaatgccacgattactgctcttaaaaagtaaaatagccttgcagaaaaaaatatcattgtttacgggaccataggagcatctggaagaaacgtgtggtaaagagttctctcaccttctaataattcttcaaagtcatcgacaaagaattctcgtaaaggtggtcgtttcggtcgtttgagggtattgacaagctgctggatttttgctgacacccggctacttactggtactcctgaaaaacaggaatcagcgggtggggaaagcgatcatcacagcttcaatgagcacccacagtcccacagtcccacagccccctccccagcgcggctacaacaggctgcatcctagatgcgatcctgggaagggcccgaggtgatcatgctgtacggtagccccgtggctaggcaggagaccggacagagatacatcggacccgaatgtctaccacgttccaggatgtgctgttctgctggtcatgctgggaggagcctcagggccacacctgcttgaccccagctctgattctcaggacagaattgtcacctgcagagggcagactcctcattcccactgccccaggccccctcttctcaacagggtgagaccatccgtggagcagtaagtccttccctgcgtctatctctccagagaccaccagcattcagcctcacaccagcattcagcctcatggaggcacgagaacatcgggccgctgagtcacgtctggaacccccagcatcccacagccccgggctcaggtttcagcaccaccacgcccaagccctgtccactcctaataaagactgagctcctcacacgcgttccaaacccacgcagctcagcccacacacaggcaatgcatcctaaagcacagaagttaaagtctctaaattcaaatttttgtgtaacagaatactagcccctacctatccaagtggaccgagaaaagccccattttaaaatactgtgctaattataatgaatgctgcaccattctgaaaatcaactggtttgatcaatgaaagagtcaaggttttcaaattttaagataaataaatcaaatgaacaagacagaggaccaagacgctgatgccacaactagatcaaaagcgtcctcctcaggcacacgctgcaggccggcaggacctgggaaaccatcacccagagctgtgggcttggacggtgcaggggtctctgtaggtgcagctggcagtccattcccctcacctgaggcagagcccttgttcgcccccgcactggaccataaaaaacagacttcaacatttgcggggaatagaacagaattcaaggaaattttttctatcaagattttttaataggtagtctcaaaatgctctatagcactttaagaattgagacattaaatatttcatatctctgaaaatacagaaaaacacacaatccagaactctcaatatccacacatagtatgttcccattaaatagcccaactaatttggttcagatgaatcataccattccaccaggccaacgattctcaagcttaatttggcagatgtcagaattgcctcagggacccccgaacttctagctcatgacgtctggggtgtgacccagaatcaccctcccagcaagggcccctgtgggattctggtgtgggaggctatgacacgccgagacagcacaacacaccacgcaggatttacctggggaacaaaggcaaaggtacagacttgaaagacgacaaagttactaaaatgacaagaataacaaaaatggccaatttagtaaagacgaactcatcagagaactaaagcaaataatgacaccaaaaggcattccaggaaaagtcatcgcactggcaatcagggcgatttcaagcgcactaactggacacttacgaaggcacagttgggctctgcctcacgtgaggatgtggcagtgcgcctgttggagctaggataggcatccctgtctgcctgcgcctgtcagggctcggataggcctccctgtccacctgttcctgtcagggctcggataggcctccctgtccgcctgtgcctgtcggctcaaataggcctccctgtctgcctgcgcctgtcagggctcggataggcatccctgtccacctgcacctgtcagggctcggataggcctccctgtccacctgttcctgtcagggcgcggacaggcctccctgtccacctgcacctgtcagagctcggacaggcctccctgtccacctgcacctgtcagggctcggataggcctccctgtccacctgttcctgtcagggcttcgataggcctccctgtccacctgcacctgtcagggctcggataggcctccctgtccacctgcacctgtcagggcgcggacaggcctccctgtccacctgttcctgtcagggcttcgataggcctccctgttcactgcacctgtcaggcctcagataggcatccccgtccacctgtcggagctcggataggcctccctgtccacctgcacctgtcagagctcggacaggcctccctgtccacctgcacctgtcagggcgcggacaggcctccctgtccacctgttcctgtcagggcttcgataggcctccctgttcactgcacctgtcaggcctcagataggcatccccgtccacctgtcggagctcggataggcctccctgtccactgtgcctgtcggggctctgataggcctccctgtccgcctgtgagtcccgtgcaccgcaagatgacagcataccaaggctgctccatgcagcttcacacaagggcattgtatttcaccgctaggttctaccctgacttttatgacctcgggaaggactgagacctaaatggaataggggctgagtgacacgaacagccgctgtagtcagaatataccaagactgggccacaaagaaggaaggaagaagccctcggccacagcctgttaccaagtcaccgatatctctgtccaacgtggataaaaagaccctctttcctccaaagtctaaagcaacatatcagcccatctgacagtaattctgttgtacatttaacttcatcttgctcttctaagtgactgttcatggtcttaacacacctgtacaagaatttctcagttgctgaaccaccgttattcagcagcaaaaacggcagcaaattctaaaatttctttttcttctcatgactaaattcctacaacatttacatttttcctacaaggaataactgtgggctcacttggagaatatttgcatttttgtggctaggccaccttccatgagaggctcccgaagatctgataaattggctttgtcagaaccgattgtaccccaggaagaaacacatccagtcatgggcacggaacgggacgtcagcacaaaccgtttaccagaaaaaaacgcatctctcctttgggacgtaccatccccggtctccatgagctcggcgttgccgtacttgggcgctgtccgggaccccgtggaaccctgcggtctctccacctgtatcgagtgctctgaggtgtacgtggttacgtcaggaggtgcagaatgattttctgtaaagaaacacatcatgagattttctggtggttgtgatgtttgctctgaaggtggaacaagccacagcccaggaagagactgaagcacaggtgctcaccctgggtgtgccatggaaagccagagccgatctcagccgcatctgccacacacatccagcacaaagggggaccccagcataactcatgttgccgcaaatggagcagagttcggtaaaacctcagacgtaatttcctaacgggagccatgtcagcagcattttaactagaataacgttagactggcaatggcagggcgtcaggaaccctgtgtgtgttcacggaggggtcctgtttcctgtctgccacagtcgacgcagccaaaggcctggaattggaaacccggctctggaaacttctggggattttgggatgtcccttaagctctccgtgcctcagtttcttcgtcaaatgggaacagtaatggccatgaccgtgtagggtagttgggtggattatgtgagttaacacgtatacagttcataggatcttcttcataaaagggggagacatcaagaactattattttattatttctcttagtacaaacaacaacagtcattcaaaaaaccacgttacaccctaatgtgtactaaggatcgtgtaaggccaatgagcgcgtggagctctttctcttacagcaccccctggagataaagttaagccgtacgtggctgaatggggaaaagcatgcttttctatttaatgaataacgcattgaggaagatgtgccaagcagcccactgatgacgcccgtcacacccagaatcttgatgacgggcgccacgatgcggatcgcgatcctgaatcctcctctgatggaagcttttcaggatcaccccgccactgtcccacgcaacagaagggcggtactttgtgtcgctgaaagtggggctcatccccaaaagcctctcttcaccggacgctgcccatgtccgcaccgtgcccggaggccgtctagacggcgaaatcaactgaacgcacaaaaacaggacacagaagatcgaggcacagaagaggccgtgacaggacgctgctttgtgatctgagaatcgggccgggtgggcggtgccgagctgcctggacacggcgtcggcccctcctgacggtgtcagtccggtgtcacaagtagattcggcaatgccgttcactgggaacccgtgactgaaaagacaagaactaaggggagggcccgccacaccgcccgtcagtgccacgacattccacctggaggcaggcaggcccgacttcctgcagaaccaacacacaccccctcaagtcctcagcggacttggatggtagcgtctgggaggcctcctctcagctccgaggtgtgaaaacgctggacacagcttgtagatggacagcgggtagagcagtggaaaaagaaaactagaatgggatttcctatcttatgccaaattggcttgactcttaagatacatgtgagatgtccctacttaattgccggcataattaaattggtggaaaaaatccacaaaggacttgagattttgcttcaacagcaagtagaagcgtggccagctctgagagactccgtgacctgagtctgcagccctgggcttttctcccctcggacacaagcagcctctgcagcctccacttctgtcccttgccggagggatcggccagtgtgactcagccatctgttgtgcttggactccttaggacactcacgcgcacgcagacgcacgatcacacacgctactttcctgtttgtaggcttctgattatctcacaaggtcaagtgcaaatctgactttttacttcttttgttttgccacagaaaatatttttccttttctgattaagtttcattattttgccactgctttttttccaaaaaaatttcaaagttacagaaaatttccagatagtctaggaagattatctttgtgcctaattagaaattaccggaatgtggtcacccgagagttacatttgggtcacactgagccttgatgtacatgagttatgagcccctcatagtttggatacattctttgtactaaaacttcctccagtactgcaagggtaaacccgcaaagggaggccaagtgccgtgattcacttgttcaaaaatatgtgttttccttggtaagattctgcccatttccttaaaattgaataaaatccgaggatacaaatgcttcccccaagtggcagagatggtgtttggcctccccgttcaggtgcccgataaagctggcagagcctcagccactatcctgggatccaatatacacatggaattttattacaaaaaaaaataacagtcacacattcctgttcattgtttaacgtactgtgatttcaagtacaggttattaattcacataaaccagtgtacatgttcctgaaactgtgttaaactgaagtttaatactgctttgcatttgagtattactttacaaacttttacagagtatttctattttctcctttatactcacaacagttctgagagagaaaaaagaaatggtttttttcatttttttcctcaccaaaagcctaaaagcaggagaactgacttcaagatcccagcagcagttattgggaaaagtgagacagacccagctctcctgccagcaaactcctgttccagacagaaaacggccgacgctttaagtctcagtgagcgaccaaggggctgagacccaagtcaatccaaaacgcctctgagcgtaaaggagtcagtgatctagaagtgaacattctggggttctggggtgtctgtgggctatttaatcacaatgacgtgcacctgcttcccactgatgattttttcagggatcaggttttcctgcggcagctgagataccgggagggtctgagcccgtggctcgagctccgttatcggcgacgtggtaagcagtcgtctccggttactgctttaatggagacacacacaaaaccctattcaacccaagtcccgtacttgatgaaaaacatttactactgaaccgttcaaaggcagagcgacgtgaggcccatcaccgctccccacgtgccagctcttcctctaataattctcactttactccttttccacagcatgttcaaacgtcatagggcagtgatcctaactttgtgctttttctcatacagagtatctccctgtcatagaacctacacaaagcagtgtgccggcccccaagaagtctgaacacctgtggcagacagcagcgtcaagcagctgtggttaaagccctcgtttccttaaatgactcccacggtcaggacgagcacatttaaaaccctgtcctgttgattgggactgttaaggtttcatgtaggagcataagtgagaagaaaagatgggagcggatacggctgcaggattccccaggaacaaggcccctggaattgcagctgtgggagggacctgggcatgagaagtgtaaagcagcttccagaaacaatccagccaaagcaccccaggggccagaggagctctgtgctctttccaccgagggattccgctgcaacgatgcaaacagagaatgtgcacacacaaaggcgtttacacaacaggcacagaaagacaccgtgaagcgtgctcacctatgtgggtctgagccatgacgtccgccagcctgtgggcagccccgctgcccccgctctgcgtagaggacgaggaggtggtggacgtggtggagccgtggatggcctggctgatccagtgctccatattgatgctgccctggctggaggtgggggtgccctgggagtccccctgcactgagccttcatcttctgagccagaagaggtatctgtgtaagaagaaaggtgatttgctgtatgttgcagcaaaaacgtgcaccacaatctcagtccctcgccaaacacagatttacttcacgtaagtctcaatagttgttcaatgactttttgatacactcttgagaagttaaaccacgtttcagataataaaccatttattttagcataatgagtttttcatccaacacaccttatataaacatgctataagatgtttgacactgtcatctcagacaaatacacactgacccatttcctctacacagcagtttgggaagaaaccaagtgtttgcttgtgtcacccacaaagtgagagaacaagggccgcgtttcctaggggatgctgagggcctgtgcggctctcaggagtctcagtgtgacgtatgtttagcccttgttagtcctgagatgttcttgtgggctctgatttttctactacatcggtgtgttagatacccatgcagctgatttctatgtcggtgtgtgtgttagacacccatgcagctgatttatttctatgtcagtgtgttagataaccatgcagctgatttatttctacatcagtgtgttagatacccatgcagctgatttatttctacattggtgtgttagataccgatgcacctgatttgtgcgttggtgtgttagataaccatgcagctgatttatttctacgtcggtgtgtgtgtgttagatacccatacagttccttaaggatcaagacactgatgatggtaacaggagagaaagcagaacgtgcctcacgcggagcagcccctccacctccccgttttcctccggggcacacgacaaaccttcatcacgtcacattttacactcaaatcaattcacctttacagtatttgtttcttatacattctcattattgatttttctatctgtgcagattggatatcttggattataacaaaatacatcaattttttcactataatttatgagaatatttttcatttaataacttttcatgcagtaccaaggtttttgggaataaattgttggtgtatttgttatttaaacttcaatttaagaatgacactcagaatcctacctccaggtgagttatgagagacgccagctcaggtgagcagctccagccatcgggtgagaggagaagtcacggcaaataatcttaagacacgggtttgttttttaaaagataataattgcaaacaatatacacacttattatcactgtcacatgacttatgctgtctgggaatttttttaaaagtttacttgttagaaaagcaacaatgttaagagcctgaaaattctctatcaccttgggttttttttttttttttttttttttttttgagacagagtcttcctctgttgcccaggctggagagcagtggcgcgatctcagctcacaataacctctcactccctggttcaagagattctcctgcctcagcctcccaggtagctgagattacaggcacctaccactatgaccggctaatttttgtatttttagtagagatggggtttcaccatgctggccaggctggtctcgaactcctgacctcgtgatttacctgcctcagcctcccaaagtgctgagattacaggcctgagccaccgctcctggcccactctgccttttaagaaaacttacacaatttctataaaagtaaaattgacacagccttgagacttttgagaaaggtacacacccaggtgtccagaaggagcacaaccatctccccagaatgtcttctcacaactctttacaatctttcattccccactcccacctacctcttccaagaaacctgaaggataatatgatatagacactcaacataatagcagcaaaccaaacaaacagcatatgacacggatgatacagcataaccaacggtgactaatatgacacagatgatacagcatgaccagcagtgactaatacgacacggatgatacagcatgaccagcggtgactaatacgacacggatgatacagcatgaccagcggtgactaatatgacacggatgatacagcatgaccagcggtgactaatatgacacggatgatacagcatgaccagcagtgactaatatgacacggatgatacagcatgaccagcagtgactaatatgacacggatgatacagcatgaccagcggtgactaatatgacacggatgatacagcatgaccagcggtgactaatatgacacggatgatacagcatgaccagcggtgactaatatgacacggatgatacagcatgaccagcggtgactaatgtgacacggatgatacagcatgaccagcggtgactaatatgacacggatgatacggcatgaccagcggtgactaatatgacacggatgatacggcatgaccagcagtgactaatatgacacggatgatacagcatgaccagtggtgactaatgtgaaatggatacagcatgaccagcggtgactaatatgacacagatgatacagcatgaccagtggtgactaatatgacacggatgatacagcatgaccagcagtgactaatatgaaatggatgcagcatgaccagcggtgactaatatgacatggatgatacagcatgaccagtggtgactaatatgacacggatgatacagcatgaccagcggtgactagaagtaaataccagagcgacaggaattcaggttaacattcaaaagtgaattaatgtcatacaccatatagaattatgggagtagaaccgcatgttaaccttaggagacatagaaaagtactgacaaactcaagataaactcaacaaaatcaggaatagaaggcaatttcctcaacctgttaaagcacattcatgaaaagccatggctaatagtgtatttaatggtaaacaatagaaggcgttttccctaagatggagaacaagacaaagatgtcccctcttgccacttttatttgacattatctggcaggttctagctagtgaaataaattaacaaatttaataataaagacatccagattagaaaagaaggaataaaagtgcctttattcatagatgacatgaccttggatgtagaaaacggcaagaagtccatcaaaaatgttttgcattactaaaaaatgagtttgatgaggtcacaggacacaagatatacatatactagcaataaacaacctgagaataaagttaagaaaatagttccattcacagtaacatcaaaaacataaaacactcagccaaacttctaacaaaaaggtacaaaatgtgtacactgacaactataaaacattactgaaattaaaggagatccaaataaatggaaactaaataaatggagatagattcatgattgtgaattggaaaactcagtattatcaagagagcaattcttcccaaactgttccattaattcaaggcactgcctaataaaatcccagaaggctttgtgtgtgtgaaattgaaagcttattctcaattttatctggaaatacaaaggacctacaatagccaaaataattttgaaaaaggaaaacaaagttggaggacttcactatctgatttcaaaactttacataaagtcacagtaattaaggcagtagtattagcagaagaatagatgtatacatcaaaggaacagaattaaacccagaaataaagtcttatatttacggtcaatttatttttgacaaacgtctcaagacaattcagtaagagaaaggtagtatttttttcaacaaatgttgctgtggcaactgggtacccaacacaccaaaaagaaaaagcatgggggaaaaaatcccccaaaccaaaccacaacaaacaaacaaaaatcccacttagatccctactgcacagataaaaattaactcaaaatggatcacagacctaaatgaaagaacagtaagactatgagacttctaaaacttccaaaaaatccataaaaattagtaaactggacttcattaaaatagaaaactactaagttttaaaagatgattatctgcctctagctaatgtaataaattaccttgatcttcgtggcttataacaacacacgtatctattatcctacagatggagaagtcagaagtgtaaaatctgagtgtcagcagagctacgttccttctggaggcttcaaaggagaatccatttcttggtctttcccaacctctagaggccacctgtgtccctgacttatggcccctcctcatctttaaagtccatcactccagtctccaattcttccttttctcttgtaaggacgttcttgattacagtgggtccacctgcttaaaccaggatagtggtcccatatcaagatctctatattaatcatagctgcaaaatcccttttaccacttaaggtaacaggttcaaaagctctggggagtaggacctgggtatcttgggggagggtcattattctgtctgctacagaacagtttgtcctttcactgagaaaccttacacctgtaaaagtcgttcagatcgtataaggcacctataacccataagatgacaaccaacccattttaaaacatgggcaaaaaatctggacattttaccaattaacatatacaaatagctatgaataggaattagcacattaaaagctaataagcacattaaaagatgcttagcatcattaactgttacaaagtaaatacacaatgatataccatttcacatcaattagaatggcaaaaataaaaataccaaaataccaactgcttctcatgatgtggagaaactgggatgctcatatactgctggtggcagtatgtaaaatggtacagctattttgtaaacaatttggcagtttttaaaaagctaaacctaaacttacaataagagtcaatcattctacttggcatcctcccaagataaaggaaattatacgtatacacaaagatatgtacataaacgtcgacagcagcattattcataattgccgaatagaggaaagaatgaataaccaactggtaaatgaataaacagcatgtgttagatccatctaacagaatataattcaacaataagaaggaataaactactgatgcatggtacagcacggacttcaaaacaggtgaaggtgtagagaagcgtggacattttatgattttatatcataaaattctaagatcataaaaaactaaaaaccataaaatcataaagtgttctatgattttatattccagaaaatttgatttctagggtcctttctttttcatagagctaacctttcatctgatagcatttgcaatcagcctaaagtacattctttagcatgtttatagtgtagttctgctgataacatattctctcagctttcatgtgtgtgaatgtgtcgtttcatccgtgtttataaaggagattttcaccggatatgagttgacagccctttcttctccttttagtactttaaaaaatgtctttccatggtcttctggtctccattgtatcttcacagaagtcatgcattgttcaaatgcttctctggagtgtaacgtgtctttttcttcggagtcctttcaggatctcctcttaatcctgcactttgactatcatgaacctggatgtgattctttttatacttgttctgcttggagttcactgaacttctcggggctggacacaggtgtttgacatcaatctgagtaaattttgactcatttcttcaaaggctcctgctcttttctcttttccttcttatattacaaggatattaacattgtgtcacaggagcttgaggttctgttcgcatttaattttggtttctctggtcttcactttggttaatttcttttcatccctcttcaagctcacagacttcatcttccttctccaacctgttaaacccaccagcaaaatttcttctatcatattttccagctttatagtgatgtctcacttatcctttccaactccacatgtgcacagcgtcccctatcatcaacattgcctaccagagtggtatacttgtcacaactgatgcttctacactgaaacatcattatcacccaaactccatcgttcacatcagggttcattcttggtgtcgtacaatatatgggtctggacaaatgtataacatgtatccaccatcacagtatcatacagagatcacatgctactaaaaaatcctcctgctttgcctattcatccctgcctccccccggaccctggctgcctcccccccggaccctggctgcctcccccccggaccctggctgcctcccccccggaccctggctgcctcccccccggaccctggctgcctcccccccggaccctggctgcctcacccccggaccctggctgcctcccccccggaccctggctgcctcccccccggaccctggctgcctccccccccggaccctggctgcctccccccggaccctggctgcctccccccggaccctggctgcctccccccggaccctggctgcctccccccggaccctggctgcctccccccggaccctggctgcctcccccacagaccctggctgcctccccctggaccctggcaaccactgatctttttactgtctccatagtcttgcctttcccaggacgtcacatagctaaaatcatacagcaaccttttcagattgcatattgctaagtgaaagaagtcaatttaagtttcctccatgtctttctatggagagctcatttattttcagcatccaataatatcccattgtctgtatgtaccacagtttacttatacattcacctactgaggggcattttggttgcttccaagttttggcaattatgaataaggctgctctaaatatctatgtgtaggctttgtatgtagacgtaagttttcaactcctttgagcaaatgccaaggagtgtaattcctagatcatatggtaaagagtatatttagttttgtaagaaaccaccaagctgtcttcctaaaggctgttctattttgctttaagaccagcaatgaatgagagagaattcccgcagctccacatcttcataggctgtggtgttgctagcattctggattctgggcattctaataggtgtatagtggtgtcttactgttgtttcaatctgcatttctctatgacatatgatgtgaagcgtcatttcatatgtcgatttgccatctttatatcttcttagatgagccatctgttagtctttgacccattttttacttattcattttttaaagacaggatctcaaaatgttgccgagtctggagcacaattccaaggcgcaatcccactactgatcagcttaggaattctgacctcctccatttccaacctaagctagttcacccctcccaggaggtcgctgggttgacgccgaacttagtgtcgacacctgagaggcataactcacaacaacccggagctcctggactcaagtgatcctcccgccttagcctcctgagtagctgagactacaggcacatgccatcacacttggctggcccctattttaatcagattgattgttttgttattgttgacttttaagagttccttgtatatttcaaataaaagttatcatttatgtcttttgcaaacatcctctccctgtctgtggcttgtattttaattactttaagagtctttgacatagcagaacatgttcatttttattggagtccagcttatcaattatttcacaccttgcacctttggtgtcatatctaaaaacttatcaccaaatcaaagtcactagatttttaccttatcttctaagaattctatagttttgtattttacatctgtcatctattttgacaggcaggaatatttcaccactatactaatgaggacagtggctctgtgatctgtttaatttttttgaaagatgtaaggtctgtgactaggtttggtgtttttctttgcatatggatgtccagttgttccagtaccatctgttaaaaatattgtgtttgctgcactgtattgcctttgttcctctgtcaaagtttagttgactatattttcttactgggctctctattctgtcccattgatccttttgtttgttctttcaccaataccacactgtctggattatcactgatttatagtaagtcttgaagttgcatagtgtcagtcttcaactttgttcttctttttcaatattgaagtggctgttctgagtctttcatctctccaaataaacttttgaatcagtgtgttgatattgaaaaaaaaactcgttcggatgttggttgggactgcattggaaggaaaacatcttgacaatattcagttttcctatccatgaacgtggactacctgtccatttagtttttctgtgaatgagttttgtagttttcctcataagatcttgaacatattttgttagattttatgcctgagtattccattttggggagtgctactggaaatttttttttaaattattatttttagtacagatggggttttgccatgttggccaggctggtctcgaactcctgacctcaagtgttctgcctgccttggcctcccaaattgctggaattatggacatgagccacttttttatttcaaattctacttgttctttgctggtaaacaggaaattcgttcaacttttgtatattaaactcaattcttttggatcttctacataggcaaacatgccatctatgaacaaagttttatttctcttcccaatgaatatgtatttatttttcttgtcataattgcattagctaggacttctagtacaatgttgaaaagaagtggtgagaggagacatccttgtttttcctgatcccctttccggatcttagtgggaaaaattctagtttctcacaattgggtatgatgttaacaataggttttttgtccatattctttatcaagttgaggaaggtgacctctgttcctagtttgctgggagcttttattatgagtgttagattttgtcaaattcttttcctttttcttagcctgttaacgtgatgaattacgttaattggttttcaaatgttaaagcagctttggatgcgtgaaacaaattccacttggttttggtgcacaattttttttttttacactgttggatttaatttgctaatattttgttgaaggttattgcatctgtgttcatgagagatgttttcttgtaatattttgttccagttttggtattaaaatgatgcttagaatgagttaagaagtattcctcagcttttatgttctgaaagagattgtagagaattggcataatttcttttagatgtttggtagaattcaccaatgaacccaactgggcctggcacttcctgttttgaaaggttatcaactactgattcaatttaacagatacaggcctatacagattgtttcctcctgttcaaattttggcagattctgtctttaaagaaattggtccatttcatccacgttatcaaatttgtggccatagagtttttcataatatttattatccttttaatgtccatgggacctgtagttatgtcccttatttcatttctgatattggtaatttatctgctgtatttctttttcttgttaaaggcttatagattttctctcaaagaaccagctgttggtttcgttgattttctctactgattttctgttttcaatgtgttgatttctgctctttcattatttgtctcctgcttacttagaatttaatttgctgttctttttctagttttctaaggtgggagcttattgatttcagatcttttttaacatatgcatttaaagctataaatttccctataaacattactttcattgcatctcacaaattttaaaaagttttcattttcatttacttcaaaactttaaagaaatcttcagatttcttccttgagcaatgcattatttttaagtgtattgtttaattcctaatattttccagtcatctattatttatttctacttcattgtggttgagaacatactcgtttaattcctattcttttaaatttgttaaggtgtgttttatggaccaaaacgtggtatatcatggtgaatgttcagcattctgttgttggaggaaatagtctataaatgtcaattatatacagttgactgaggatgttgttgatttcaattttgtccttactgattttctggctactgaattggtccatttctgataaaggggtgttaaagtctccaactataatactggattatttctccttgaagtttatcagtttttgctttggcattttgatgctttcttaggcaaaaatacatttaaggattgttttatcttcttggagaaaataatcatctctggtaacttcccttgatgtaaagcctgctctgtcaaattaacatcaccacttccattttttaaaattagtgttggctgggcagtggctcatgcctgtaatcccagcactttaggaggccgaggcaggatgatcacctgaggtcaggagttcaagactggcttggccaacatagtgaaaccccatctctacaaaaataggaaaaaaaaaatagccaggcatgatgacaaatgcctgtagtcccagctactcgggaggctgaggcaggagaatcacttgaatctgggaggcggaggttgcactgagataagatcgggctattgcactccagcctgggccaaggagtaagactccatctcaaaaaaaataaaataaataaattagtgttaacatttatatctttttctatccctttactcttgatctatatatatttctttatatctaaagtagatttcttatatagacaatatatagttgggtgcatttagactgacattgaaagtgagtaatgatatacagttgaattaatatctaccatatttgttactattttctatctgttgcccttttgtctttttttttctttcttcttgtggtcttaattgagcattttctattttctttcctttcttatcatatcagttacttttttttaagtggctgccttgggatttgcaatataaattcacaagtaacccaagcccactttcaaatgacactatactgctttctggataatgcaagcacactataaaaacaaaataatcctaaatcctaattgctctctcccatcccttgtatcactgctgtcattcatttcacttacatttaactgtgtgtatatggtatatacataagcatataatcaaatacactgtcgctattatgaatgaactgttacattaaatctattaagaaaaataaaagtttttctcctaccttcactgttccttctttgatgctttttcttaacagtcaaggtcttgctctgttgcccagggtggagtagagtggcatcattatagctcaccgcagccttgaaaaggatcctgggctcaagtgaccctcccatcttggcctctcaaagtagctgggactacaggtgtcagccaccatgtttggctttttttaagagacagagtctcactacgttgcccaggctggtctcaaataaccggcctccagcaattctcccgccttggcctcccagagtgttagggtgacaggtgtgagcccctgtacacagactctgctcttcctttctttatgcacagctgagttactgacctctactattttctctaaagaactatgaacactttttgcaaggcaggtctactggcaacaaatttctcaatttttctctgagaaagtctttacttttccttcactttttgaaagataatttcacagggtatagacttctaggttaatggcatttttttcctctcaatagtttaaatatttcactctacttcttgctttcgtggtttttgaggggaagttgaatagaattcttatctttgatcctctatagggaaggagattactctggtttctttgttggggtttttaaaaaatctttgattcgccgtagtttgaaaattatatgcccaagtatagtttatttttgtttttgtcgttgttgtttttacatttatcctgcttcgtgtttctggagcttcctgaatctatggtttggtgtctggcattaatctgaggaaattcagccattaatgttaaaaatacttcttctgttcctcattcttctccttgtattaccgttccgcataatttatgctttctgtagtcgtcccatagtgcttggatactctgttcttttttgctttttagtgttctctttgcttttcagttctggaggttggagttggatatttccttttccccaggccggaaggctttgataaaaccccaccaggttagtctctagttaactagcttctctggaaggtagacctagttaagagtgctcctgcatatttgaaaatgattcctattctccgtcccctgtagtaagtatgaggggattcttccctgatatttacttcgagaacctggttgagcttctgatggtacaactcacaaaatcatggccctgtatgcacaggcctcctggacgttttaactctcagacttggccacaacctcactacagcaatttgtcaattccagttcaggttttccaatcccagcgggggttccttggagctttctgctccagtgtatggtgattctccacttcacctgtccaccctatctggggacagtggcttgcctgtgacctcatgtctcttgcaggtttaagaagagctgctgagttttcagtttgctcagcttttcacctgtgaggaggcagtgacaattctcaagattatcacgtatggaacctgaaactccccaactccattgtaataaaaagtgtcttcccttcctctggctcaagtattaaaatattttcttttcgttctttgacacattttaatttgattcccgaaatatttataattgtagatttaaaaactctgtcttttgctgtatcagacatctagactggcaccttccaacagaattatgagaatcctatatagaactttaaacctactttgtagcctcatatatatatataaatatataaacaggtacaattaattttattaatatacttttaactcaaaatgctcatactatactttcaataagaaatacaaagaaaatattttctattttttatattaactggtgtctttcacacagcgaattcagttcagaccgggcgcacttcatgtactcagccaccacgtgtggtgagtgacagagatcatcttgcatgtgtgtccacattttactgcctttttcttgaccacagattctacctccggtttctctgtgtatgcagtgattgtttgcttaatattgcacattgtgggtaacgtgttgagcacgctcaggatcccataagcttcttcggaagctttccagctcttgttttagcaggcagcgcaggcactgctgggtcatcgtgaccatgggcaggcttggattgatttgctgctggtgtggatgggtggagagctccagtcctgcacccactccgatctccgcctcctggacttggcagggtggcatgctccgcccacaccagagctctctccgagctccgcctcctggacgtagtagggtggccatgctccacccacacctgagctctgagctccacctcctagacgtggtagggtgatatgctccacccacacctgagctctctctcagctccacctcctggacgtggtagggtgatatactctgcccacacctgagctctctccaagctccgcctcctggacatggtagggtggccatgctccacccacacctgagatctctctgagctctgcttcctggacatggtagggtgatatgctccgcccacacctgagctctctctgagctccgcctcctggacatggtagggtgatatgctccacccacacctgagctctctctgagctccacctcctggacatggtagggtgatatgctccgcccacacctgagctctctctgagctccgcctcctggacgtggtagggtgatatgctccacccacacctgagctctctccgagctccgcctcctggatgtggtagggtggccatgctccacccacacctgagctctctccgagctccgcctcctggacatggtagggtgatatgctccgcccacacctgagctctctctgagctccacctcctggacatggtagggtgatatgctccgtccacacctgagctctgagctccgcctcctggacatggtagggtgatatgctccacccacacctgagctctctccaagctccacctcctggatgtggtaggatgatatgctccacccacacctgaggtctctctgagctccgcctcctggacatggtagggtgatatgctccacccacacctgagctctgagctccacctcctggacatggtagggtggccatgctccacccacacctgagctctgagctccgcctcctgaatgtggtagggtgatatgctccgcccacacctgagctctctctgatctccgcctcctggacgtggtagggtggccatgctccactcacacctgagctctctgagccacggtctgcaggtgttctccaggcagagggcaaatgtactgtctgtgcgtctcattcattctcctgccctcaagttctggctggcacagctgtagtcacagacttaaaacagccatctcattcgttttgtgcagttttacagttgtttatggcagaggtgtgatttgggtccctgttatctcatcatggctagaagcagaagttttggcaaattattcttgtatctttacatttgaaaattaagggaaagtttcacccatggaatattagcattgtgacaatgctaatgagagtttctccagaaactatgatcctggtcagcagccagtcatttcatagaagataaactttaagaatattctctgaagagcaatgaaactgagataagatctaaccactgttaccaacaaccaagaaaaataggtaagaaaatgcagctaagattttgttcaagtaagcagggtaataaacatgcagactactgctaagcacaaaatagctgggagtaaaaaatttttatgatattgatatttatgattgtacaaaactaccccatgtgatatcacaaggactcctgatgaaaatttacagaaggttttttatggtttatataaaaatgctagtcaaatccaaatatttcacaaaaataacatttcaaatattcttttgcattttgcaaagacatctgtacaatgaggttattcatcacacatgacccagtaacatctctcagtggttggattcaatatgagaaataagcaagcaaataaccacactgcttcttccatttcaaactcatcgtttctcttataaaaagtggtcaagaaaaatgtgtgttgccttaaataaccggttagtgccaagaattcggtttaaaatatttcaagtgggttatccttttaagtccattttgttagttacacaaagaacacatacaaataacatttttttaccataagttttggcaaattataaccataaactaaacaaacaggattaagcattttttttttttgagatagggtcttcctctgttgcccaggctgcagtgcagtggcatgaccatggctcactgcagcctcagcctccttgggcccaagtgatcctcccacctcagcctcccgagcagctgggactatgcgcacacaccaccatgcctggctgatttctgtatttttggtggagacagggttttggaatgttgcccaggctggtctcaaactccaggactcaagcaatctgcctgccttggcttcccaaagtgctgaggctggaggcatgagccaccatgcctggcctaatcatttttaaagagtctctatttattatcgttatttttttctaattgagatggggtcttgctgtgtttcccaggctggagtgcagtggtgccatctcagctcacggcaacctctgcctcccaggctcaagtgatttttccacctcagcctcccaagtagctgggactacaggtgtacaccaccaggcccagctaattttttgtacttttggtggagacaaaatgtacaaaaggcattttggtacattttgccatgttttccgggctggtcttgaactcttgggctcaagccatacgcctgccctggactcccaaagtgcaggagttacaggcatgagctaccgtgcctagcccctaattacgtgctgttgcttaatattaaaataaagaaaaggaggagcccaagggagcacgttggcagaaagagctcccttgccaacaaccttgctagcacggcgttcactcccttgcccgctagcatttgctagcacggcgttcactcccttgccaacaaccttgctagcacggcgttcactcccttgcccactggcatttgctagcacggcgttcactctcttgcccgctggcactgtgttctttagacgaagatcacgcatgtgtaaatgaaaaacaacaacaacataggaacaccctgtctccacaaaaacttaaaaattagctgggtgtggtggcatgcacctgtggtcccaggtgcttgagaggctgaagtgggaggaccgcctgagcccaggtggtcacggctgcagtgagccaagagctgcaatcatgacactgaattctgaccgtggcgatagagcaagaccctgtctcaaaacaaacaaaaaacaacaaaaaccccaaattatgcactctttaagttctgtcctatcaatctcagtaccttcattagtaaaggtataaaggtgaatactcaggagctacttggaataatgtgggcatatgcttgatctcagctctgatctgatgcatgtccttctgtctcactgcttgccaagaccaagctaaacttcaaaagtaaaaatactcccaaaaaattgtacattttcaactattcatattgtaccttaagtttctcttgtagtggagaaaaaaatggtgtcaaagtggtgtgtagcttcaaagtgggatgtaaggtgatttaggtcctttgagaagacaagcttgcaactgtcacatgaataatgttggaatcaaaatcacagaaactaaacaccaaacaacgtaggttcaatccatgtttctaacaagtatctggataactacactttctgctttacttgggtgggaagatcatgagatgtagtttataattatttgggcagagaaaatagagaatttgggtagttatgtaaaattcaagattaaataaaagcagtattacataacacaaatataaatgggctattaccttcagtaattcagatcggggttggcacatctgtgcaccaaatctggtccgctgttcttataaagttttattggtacacagccatacccacttgctatcacctatggctgctttcacactccaagggcagagttgagtggttgtgacagaccttatggcctgcaggaactaaaatactatctggcaacttgcaggcaaagtttatgacccgtgatttgggtaactgcctaaattgtccaatttgcttgttctaaaacaatacaacaatatagcacatttatatgaagatttgagaacatgtatgcaccagcctaatcagaagaaaagtccaattccacccagaggggtacaaactcttccctttcccctacaaagaattaaatgaataaaattgtttgagattttactggtatgtatcatatgtatgagtcttgatgaaaagttaaaaatgtgtttttatacagatacataataatgttacttttccttccacgtttaactcatacaacactgtttttggacttctggttcacaaaatctgcattactgcttcattattttgaaagcaaaaacccctgattgctgggctaggtcaattctgaggtgcccggcacattcaggaggccgtgtcggggagcgtgtcccttacctggaggggtgtaggcgtccatcgaggtctgcacgaccagggacctgcgtttggaaggcataggcactgccatcttccgctctttgtgtttggccagagccgcctggacagcttccgtgtggacgtctgaaacggagagagctcagtcactcagtgctcagctgaggtcccagaggccaagctgcaccctcctctctgtccctgcagcacagttcatccaccttctgaaactcaccaacagatgggtgggcgaggaaagaaaatcagtgtttacaattccagtaaagacattaaaattcattcacagacttttaatcatttattttattaccacagaatccatatccataagcaaacactggctgtaaactgcactgagatttgtctttttagggtgaatggaccttgatctttggagatctctttgtaggtcacacgttcgagcctccaaatcctttcactgtactgctgagaggctgtgcatgcctcgcaccccaactcacagccacggtcacagctcagctgagcaccagccacaggccaggactgtgttggctattgacatgggttggctgtgtccccacccaaatctcaacttgaattatatctcccagaattcccatgtgttgtgggagggacccaggaagaggtaattgaatcattggggcccatctttcccgtgctattatcgtgatagtgagtaagtttcatgagatctgatggtttattagaggtttccgcttttgcttctacctcgttttctcttgctgctgacatgtaaaaagtgccttttgcctcccaccatgattctgaggcctccccagccatgcggaactgcaaggccaattaaacctttttattcccagtcttgggtatgtctttatcagcaatgtgaaaatggactaatacaaccattaacacgctttgtggctatgaatccattacattaattccacacattcaccaagtgcctcctctgtaagtccctaagggctgggaacgcagtggtgataaggcagacagtgtcacagcatctcacgcaggccaattcctaatggacaagacaggtgacagacggggtagagaattaaagcagagacagacgctgtggcaactccaaactgtgaagccagggaagaaccctctcaacacaaaatcagaataacaggcttcaagacaagaatcttcgagacacaggcaaaaacccactcaaaggccctaaactgtgagtgagaacggtgttagcagaataaaatcaccaccaaccaaaatggccagtgtgagtgaagacgggttgggggaaagggtccccaggacgaggcagtcttctctgaagctgtgagaatgatcccactgaaagggaatcagacatgtctttcctgcttaaaccccgcgagctgccacctgagacaggacccagacccgccgcatcacgcccacaatcagctcatcacactgcttggtcttggtcagcctttgtgcgtacttctctctctaactagataaagagcctggttttctggccactctttctaattcccaggtcaaaaatcaatatgtgactgacttgggctcatggccaaaaactgaagggctcatcagtgaggtgacacagtccactcacttcccacaaatcactttttgttttgcatattctccattttaaactttttggatataatttcagatacacagaaaatctgcaagaccagtgtagagaattcccatataacttttaccaggctcaccaactgctcctatcttacaccactgctctccccgctcccccatgaattttctaagtcaaatgaaaataaatttcagatactatattcctctatacctaaatgtttcaatgtatttcctaaacacaagaatattctctcacatacattttcctcaagatcaggaaatttagctgtcatatacaaagttcacattcaaatggtgtcaactgtctccataattttcttactttgtcttcctattttatgatccaatccaggatcatgaattgcatttatttgtcaagtgatttttacccttcgtgaatccaagtttctcagcttttttgtttcttgaaattggaaattttcaagaatacaggttagttattttacagcttgtcctttattttggtatcttccggactagactcaagagtatgcattttagcagggataccgcagaagtctgtcctgtgtggcaatgttaatgtcggcaactcagtgaaggtggtgcttaagttcctccaaagcaaagatgctactactcacattgcaattaagatttgggaggagagactgtgacactatgtacatattctgtttttcatcgatccttcactactagttttagcatccactgatgatttcctgccattccttctaaatcattagatcttctacattcacttaaaaatatttactcattttatctttcatcactcatttacttctgtcaatatgaactcatggagtctggcttggtgggtcataattcataattataatggtttgttttggtgctcaattggttccagatttgacaccggattccccagcccttggaccagggctcctgctagtgaagtatggtgtttggaagctaagactaggaaccgggtgtgctgtcactgggggtctctgctgctgggcactgccagcaagcagaacacacaacatgtgtgtacacacatgtacacccacacccatccacaggcacttctgtccctgtctacatctgtcgggagccaccagctcatactggtacctcctgctgcaacccaatcccacatgatccattccaggctttggccttttcttatttctacctctcttgccaaaaaagaaacctggctcctgttaccctcaatatattcactaatttattaagcttatttgcttaagcctggagatacagaaatgctttcagaattgctatctagtaccactgtgaaaaatctatcaaatagagttcagtgttcatttacaattattttttcattgttttcttttggaagggcgggagtacaaagtatacacagtgaaatgttcagatcttaagtacacttggtgcactttgataagtggaaatctacctattaccctgatcaaatcttttgcctcaaagttcccacacatcccctcccggtcaatcctggccctcgtgagacagccactgttcattcatgaggcgtgttcactggtgctcttccgtcacctgagactcgtgtagattccccatcgtcacatggactccacgccatggtgttccctcaagagacagccactgttcattcatgaggagtgttccttggcgctcttccatcacccgagactcgtgtagattctctaccattgcatggactccacgccatggtgttccctcaagagacagccaccgttcattcatgaggagtgttccttggcactgttccgtcacccgagactcgtgtagattctccaccgtcacatggagcccacggcatagtgttcactcaagagacagccactgttcattcatgaggagtgttccttggcgctcttccatcatccgagactcatgtagattctccatcatcacatggagcccacgccatggtgttcactcaagagacagccactgttcattcatgaggagtgtttcttggtgctcttccgtcacccgagacttgtgtagattctccaccgtcacatggagcccacagcatggtgttcactccagagacagccactgttcattcatgaggagtgttccttggcgctattccgtcacctgacactcgtgtagattctccaccgtcacatggactccacagcatggtgttcactctctgctcaattcaaggctcctggaactcatcgccgttgcctattttggtttcagtattttgtacatttttcctgatgggaactaggacaatgtatgaatatatcataatttgctcatgtttctccagctgagagagatttacgttgtttccagtttttggctatgagaatttactctggagataatgtgcattcttttacacggacacacattttcatctctccttggtgaacatctacagcatacctgctgggccatatggtaaatgtacacattttaaagaaactgccacactgtttgctaaagtggccgtgccgttttaagtctccatcagtctgagatccagcctgtcatatcttcactagcacctgctaccatcctcctcctccactcttgtgaagtggaacctcatgggtttaagttgtacttaccaaatgacccctggtgagcgcctttcatgggaccactgggcatctgtatacatctgttgtgaagagtctatcttgcactgggcatctgtatacaactgttgtgaagagtctcatggcccatggggcatctgtatacaactgttgtgaagagtctatcttgcactggacatctgtatacatctgttgtgaagagtctgtcttgcactggacatctgtatacatctgttgtgaagagtctcacaggcccactgggcatctgtatatattggttgcaaagagtatatcttgcactggacatctgtatatatctgttgtgaagagtctcacaggcccactggacatctgtatacaactgttgtgaagagtctatcttgcactgggcatctgtatacatctgttgcgaagagtctcacagtccactgggcatctgtatacatctgttgtgaagagtctcatggtctactgggcatctgtatacaactgttgcgaagagtctatcttgcactgggcatctgtatacatctgttgtgaagagtccatcttgcactggacatctgtatacatctgttgtgaagagtctcacagtccactgagcatctgtatacacctgttgtgaagagtctcacaggaccactgggcatctctatacatctgttgtgaagagtctcacggtccactgggcatctgtatacatctgctgtgaagagtctatcttgcactggccatctgtatacatctattgagaagagtctatcttgcactggccatctgtatacatctgttgtgaagtctcacaggcccactgggcgtctgtatacatctgttgtgaagagtctcacggtccactgggcatctgtatacatcagtcgtgaagagtctatcttgcactggacatctgtatacatctgttgtgaagagtctcacaggcccactgggcatctgtatacgtctgttgcaaagagtctcatggtccactgggcaactgtatacatctgttgtgaagagtctcaccgttcactaggcatctatatacatctgttgcaaagagtctatcttgcactgggcatctgtatacatctgttgtgaaaagtctcacagtccactgggcatctgtatacacctgtcatgaagagtctcacggtccactgggcatctatatacatctgttgcgaagagtctatcttccactggacatcggtatacaactgttgtgaagagtctcatggtccactgggcatctgtatacctctgttgtgaagagtcccatggtccactgggcatctgtatacatctgttgtgaagagtgtatcttgcatgcttgcaaaattcacaccatttctggttgcttctagatttcctaaaattttctaaataaggccctgtgtcttcggtaaatcaagtgtctcatgccttccaagtctgtgccttttagttctcctgactcacttcattgacgagggccccagtgagtgccatgcagacctgaaccacggagaatggccatgatcccctgacacccaactgtgggcagagcgccccggctgccaccatggaggaggggcatcagctctcatttttcaggaagggcccttatcaaacagagaaagatcccttctgttcctgatgtgacaggaaattcgtataacgactattaaatttcaacagatgtttttcagcatcttctgagatgataaaatgggttttctcctttattttttgtcaatgtagtgaattacattgatttttgaatgatgagccaagtgtgccaggcaaaactacaccacatcaagagaacaaactcaactggttgtgatattcatatcccttttacatattttgggtttgatgtagtaataatttgtaaaaagcttcggcatctatatgtcaagaagagtgaaaagtgtgagatttttgtctcgcatgcaaactaacaagggagccagcaccagcccaacatgctgacagagctgggacattcccaggccagaaacaaagggcttgtcacacacagtggggcagcaggacccactcacccctgtcgatactcaggatcacacacagtggagcagcaggacccactcatccccatctatactcaggatcacacacagtggggcagtaggacccaatcacccccgtcgatattcaggatcacacacagtggggcagcaggacccactcacccctgtcgatattcaggatcacacacagtggggcagcaggacccactcacccctgtcgatactcaggatcacacacagtggggcagcaggacccactcatccccatctatactcaggatcacacacagtggggcagcaggacccgctcactcccatcgatactcaggatcacacacagtggggcagcaggacccgctcactcccatcaatactcaggatcacatgcagtggggcagcaggacccactcacccgtcgataatcaggatcacacacagtggggcagcaggacccactcatccctgtctatactcaggatcacacacagtggggcagcaggacccaatcacccccattgatattcaggatcacacacagtggggcagcaggacccgctcactcccactgatgctcaggatcacacacagtagggcagcaggacccactcatccccgtctatactcaggatcacacacagtggggcagcaggacccgctcactcccgtcgatactcaggatcacacacagtgcggcagcaggacccactcattcccattaataatcaggatcacacacagtggggcagcaggacccactcatccctgtctatactcaggatcacacacagtggggcagcaggacccaatcacccccgttgatattcaggatcacacacagtggggcagcaggacccgctcactcccactgatgctcaggatcacacacagtagggcagcaggacccactcatccccgtctatactcaggatcacacacagtggggcagcaggacccactcatccccatctatactcaggatcacacacagtggggcagcaggacccgctcactcccgtcgatactcaggatcacacacagtgcggcagcaggacccactcattcccgtcaataatcaggatcacacacagtggggcagcaggacccactcatccctgtctatactcaggatcacacacagtgggtcagcaggacccactcaccccattgatattcaggatcacacacagtggggcagcaggacccactcactcccgtcgatactcaggatcacacgcagtggggcagcaggacccactcacccctgtcgataatcaggatcactcacagtggggcagcaggacccactcatccccgtctatactcaggatcacacacagtggggcagcaggacccgctcactcccgttgatactcaggatcacacacagtggggcagcaggacccgctcactcccgttgatactcaggatcacacacagtggggcaagcaggacccactcactcccgtcgatactcaggatcacacacagtggggcaagcaggacccactcacccctgtcgatattcaggatcacacacagtggggcagcaggacccgctcactcccatcaatactcatgatcacacacagtggggcagcaggacccactcacccctgtcgatactcaggatcacacacagtggggcagcaggacccactcatcctcatctatactcaggatcacacacagtggggcagcaggacctgctcactcccgtcgatactcaggatcacacacagtggggcagaaggacccactcatcctcatctatactcaggatcacacacagtggggcagcaggacctgctcactcccgtcgatactcaggatcacacacagtggggcagaaggacccactcatcctcatctatactcaggatcacacacagtggggcagcaggacctgctcactcccgtcgatactcaggatcacacacagtgcggcagcaggacccactcatccctgttgatactcaggatcatatacactggggcagcaggacccactcacccctgtcaatactcaggatcacatacagtggggcagcaagacccactcacccccgtcgatactcagcggcatcctttaccacttaagggactttcaagctcatcttgtgtaacaaaagtcgacttctccacctccccatacaaaggcaagatgttatttaggcaaacaaaattaacgatcaagtaaagaaatgcttacaattttctcttctgagaaaatttgtttttagtgactgcggctatcaaggcacacacttgcatattatacataatactgcttgtggccaaagtcacggtactttcctactcttaaataatttatcaagagtcctgaaaagtgagtatcttaaagagaaaagtggtatgtggcttactccaggctaaggagtgagtaaggcagcctattcttgtgaaatatgtgatttttctacaggaaggggaatatcacactctggggactgtggtggggtcgggggaggggggagggatagcagtgggagatatacctaatgatagatgacacgttggtgggtgcagcgcaccagcatggcacatgtatacatatgtaactaacctgcacaatgtgcacatgtaccctaaaacttaaagtataattaaaaaaaaaaaaaaaagaagtaaacacattcagttacctaattccatgaagaaaatattaataaactattaataaaaacacatacacacacacaactacagtcatgtgccaaataaagatgtttcagtcaacaacaacaaaaaaaaaaaaaaaagaaaatctgagaacaagatatcattgtgagattgttatctccaggaaggagtgaaatgggtgctgggaaattgagggagccttggaacaggaatctcaccatctcgaatggggaatccagcaaatgggaaaacagtcgctctgattcacggacgtttctgaaagcttcacgtccactccatgttgcatttgaatgacttttctccttgtgatgtggacccgacacaagagaggtcccacgtagacattcggcatttgtcagggtctggcaccgtggctcacttccacagatttaacatgtttatgtataaattacaatggtcccgtgttgcatttgaatgacttttcttcttgtgatgtggacccgacacaagagaggtcccacgtagacatttggcacttgtcaggatctggcaccttgactcacttctacagatttaagatgtttacgtatcaattacaatggctcaactgtataaaagctggtatcagttatggatcaattcccttatttctctcttgggccacacttcctgcttctgcagaacatatcacttggctgcaacacacaatgttgacattgaaaataaaaaagactgtataaaaatgatgcagagaattcttctgaaaggccactgggacacacactttgttggtgatcagctgtctactagcagcagcaagagagacagagctccacgcatgagcagccacagcacctgggtctgtgacccacaccaagacccccagggtgacgacaggccaaccaacagccttggaaagtacacttccttcccagaagagcttcccaagagaaaacagaaacactgataattgcaggcatttccatgactggtctggaacaatgaaaccactcacctccaacaaggaacacatcttgtttcaactgaggcaactaaaaagacgaaggaaatagcacaaaagccaggttggttctgtcacttacacacacacagacatgtacaggtctgtatgtgcgtacatgtatgtatatgtccatatgtgtgggtataaaatatactgtctatgcctcaataacggcatcgtctaaattcagcctgtgagttcctcagggccagggagggagtctcaaagcccatctctgcagcaccgggctgtgctccccagcccctgcctgtgggcggtgactggtgaagcaacaaaccctcccagccctgttccttctacaccacatccggaacaggcgtacgtacacctggtatagaaagctcccacagcctgaacagatcattcgattctaagtcaggttaacctaatctctgcagtgcagtcctacaaacagattttcaaaaagttaccaaaccaccacctcaaacctcaacactttgtctacttggaaagaggacgtgggactgggatttactcggccaccaaaacactcacagggtattatcctatcgcccttcagtgcccagaataatcatgtggtctctcgcagtaaaaacaaaaccacaaccaccgcaacccagcttttcttcaagttgtagggagttttacagcctctttctatgtggtctttctttttgccccaaactggatattctttttactttctccttatttcctgactataatttaatcaatgtaattaaagtgcttgtgttagaagcaattttacttaaaaagaattgaaagaactacatcaaaatattaacagtagccatttcaggatgacaagatgacaacgtattgttttttgttcattctcttcaacatttgcgaagttttctgccttgagtgtaaccacttttgccatcagaggttacatatagtgcttgatggaatgaggccatagagcacacacaccaccctctaacacaaagcaatcatgtggggaaggatggagacacaggaaaggtacatcttgaagaaatgcgggtttttttccataaaggcaaaagacattttaagaaatgtttgcaccatacacaagtctgctacatttggtcaaaaaactgagaaaacagtaacagaagaatacttctgcccacaaggagaccagcacacccagctcagggcgacacaaggagaccagcacacccagctcggggcgactccagacgaggacagagagtggtttcctcacagctgacccacaggatcgggtaacacgagcaggagggaagcatggggaccacaaagatgtcagactgtggactgcacagcagaagacagcaacacaaaccagtggagtcactaaaaacaattgcaaaaagatgtctacattctgctttaaccggaaatcagtggcacagtgacacttcaaaacatccataaacagcaccctgaagattccgtcagactctacatggaacaatgttaaggcaaataatgataacgggatagcgctaaggggtcttctcagtgcagacccttagagcgcgcactaaccccatcatcaaaacacggcaaacacgtggaaaaaggacaacctgcccaggggtgaagagcagcttctgaagcacgcagtgtaattatgagtgactaaagtgagtcagaatctacctccatgtgctaagttgttgctgtgtttaataatcccagtccaactcaaaatatccaagccagaaaggagcatccggccactaacatctacaatagcgattaaatggacagcgctttgtcgaaagacctttcacaacgtgacacctagagggaagcgaagcaaccaagccacgatggccccctggttcctctcgctgctcctcctgggtcctcagcacagccgggtggctctgctggtgccctcctgcagagaaaacaccacacaccgctactgaggaggtctcttatgacatccagcttaaaaggccgcatgtccactggccagtggcccaaatcccacaggtgaggcgagagaagagggatagacttgaccacagggcacggggcaggatggacccatctcccttgagagccaacgccagcggatcaccgggaggcctggccagtctgaggccccagtgcgaggaagggggcagtgttggattaacacacagtgctggaaagggtatgagctgagaacaaagacgtttacagagctctgcataaaacccagatcactgtgagaagagctcataagatgaagaacttttaggaaaatataacatgggtaaacaggttgctacaaaacaaatattcccttgaaaacacaatatccttttcataaaatgagctgataaatgaaatctagcagctgtgcagcatcagaaatccattacagcatctgatcaagcgtcctccaaagccttaattacaaatgccctgaatacagttttacccggccacatgaatgagacaccagatgagaggccgtggaatggaaacaatgagaaacagaaatctctcgggtgaaggtaccaggcaggattgcagcggagtcaacagacatgtgtgcaaacatcacgagagtaacaagatttgctggtcatgctggacatacagtgtcaaagactccagcaaatgcctgaaatacaaatgcttaaaacgataggagaaaataatctggaggctcagcagtcaggacagagggcagtgattgtctagtatttttaagtatctttgaggaagagcactgaaagtggtcaaggatacttccacttagggagaggctaggaagtgacggcttaaaatttcacgtaaatggaagatgattctagtttgggatcctaaagcagcattaacgtgttatcaaagcaaagagaaaagaagcagatgcataaatactgaatgagaaaggaatgagggaatgtaacaggtacagctggactcagggctgtcagggcaaacacagcacaggggctccaaggagaccacgctgcctgcagccatctcaggcagggagggatattgctggagaagctcctacaaagctgtcggagctgggggtgagctgctggctgccatgcaacacagaggccagagaccccagcagcagcaggacctgctagagcctctgtgcacagccctgagactaagaagtgaaaccactgtcctcacatgcctctgtcacacttcacaaacacaactcaacagaatttgcaggactcagatccatggtttctgaagaaggcaataaagggtgaatttggagctgagaggcaataaattgatagaggtgcatttggtgactccaaaagaggcagatctttctcgttttttctgctgtggctgctaacagttcattccctttaggcctttcactctaagaacccagaagcacccatctattaagagaagggcttattcaggatcagcttcatgcagcattgaataaatcactattgctagtgaagagtttgttggtactacttacatttatagtgttagataaattggttaactaaaatacatttaacagcgtttcttaaagtactaaaaagggataaaatactaaaaatactaaaaagggataaagtactaaaaaggggataaaaatgtcagcacccctcaaacccctcagagaaagaggtagtatacaaatgcaccctgtatgcttgatgtcattattgcaatgagatattcagggataaaagcatcagcacctatcaaacccctcagagaaagaggtagtatacaaatgcaccatctatgcttgatgtcattattgcaatgagatattcggggataaaaacatcagcacccttcgaacccctcagagaaagaggtagtatacaaatgcaccatctatgcttgatgtcattattgcaatgagatactcagggataaaaacatcagcacccctcagagaaagaggtagtatacaaacgcaccctctatgctcgatgtcattattgcaatgagatattcgggggataaaaacatgagcacccctggaaccctcagagaaagaggtagtatacaaatgcgccctttatgcttgaagtcattattgctgttactagtattctagattactatgtatatccacagctttaaatctttagaaaaacccatacccttcacttccatcttttgaagtcataaatcacaatccatttcctagagctcctgccatttgcaccaagctcacagcattacacagtgagcacacacacagcctggggctgctgtccaatggcaaagacaaccatgagtcaacagaagagaatgttcctccaaggtagatacgtggcttcacagcagcagagcaggaagacgtaggttcgggagccaggccgcaccggttcaaaccccagctcctctgtgaccttgggcaagttgcttaacctatttgcacccccatttccctgggtgcaaatcaggaacagtgagtccctgcctgaggagtggcccatgaggagtaaatgagatgaaaacactctgcagtgagtccctgcctgaggggagaccgtgaggaataaatgagatgaaaacactgcagtgagtccctgcctgaggggagaccgtgaggagtaaatgagatgaaaacactctgcagtgagtccctgcctgaggggagaccgtgaggagtaaatgagatgaaaacactctgcagtgagtccctgcctgaggggagaccgtgaggagcaaatgagatgaaaacactctgcagtgagtccctgcctgaggggaggccgtgaggagcaaatgagatgaaaacactctgcagtgagtccctgcctgaggggaggccgtgaggagcaaatgagatgaaaacactctgcagtgagtccctgcctgaggggagaccgtgaggaataaatgagatgaaaacactctgcagtgagtccctgcctgaggggagaccgtgaggaataaatgagatgaaaacactctgcagtgagtccctgcctgaggggaggccgtgaggagtaaatgagatgaaaacactctgcagtgagtccctgcctgaggggaggccgtgaggagtaaatgagatgaaaacactctgcagtgagtccctgcctgaggggaggccgtgaggagtaaatgagatgaaaacactctgcagtgagtccctgcctgaggggaggccgtgaggagcaaatgagatgaaaacactctgcagtgagtccctgcctgaggggagactgtgaggaataaatgagatgaaaacactctgcagtgagtccctgcctgaggggagactgtgaggaataaatgagatgaaaacactctgcagtgagtccctgcctgaggggaggccgtgaggagtaaatgagatgaaaacactctgcagtgagtccctgcctgaggggagactgtgaggagtaaatgagatgaaaacactctgcagtgagtccctgcctgaggggaggccgtgaggagtaaatgagatgaaaacactctgcagtgagtccctgcctgaggggaggccatgaggagtaaatgagatgaaaacactctgcagtgagtccctgcctgaggggaggccgtgaggagtaaatgagatgagaacactctgcagtgagtccctgcctgaggggaggctgtgaggagtaaatgagatgaaaacactctgcagtgagtccctgcctgaggggagactgtgaggagtaaatgagtgactgaatcaaagcactcacagcggagctgcctcctggtgattaaaacactctgcaagtgcaagagcttaagatgctcctcctggttagtgtgacccaagtctggaaagaggacagagaagaaagccaagcctgggagaagccaaaactgtgcaagaggccagacgagacaggctgcatggaattccacctgtccacggccaccgtttgtctccactacacagggccatctgtgttccctcccttttgtctccactacatagggccatctgtgttcccttccacgacgatttttgttccaccgtttcgttctttggtaaactgcacacaaaagcagaggtgtggagagttgtgcaaaatggtcaagacagagtgaaggcaagaagattttattttatcctcactcattccttctctaagtcttttcttcatgtggactggattctctgacctgccatgtccaggctattgatgggcccagcaaaaacatacttcatttctcttacagtgtttatttctagcattgccttttgattcctagattttccatctctctgctcacatatccacctccaattacggcacaatggtttgaggttataatctcaattctttgacagatctaggaggagttgcttattttcggtttgtacagctttttgctcaagaggacaagcgtgatgacttccaagctccttaggtgctggactggaagctacaagtctatgcatctcctattttattttattctttttattattgtctcacttctcccttctgtggacttaattttttctaacatgttaagataaatgcttatttcttcagtttccaagatgtcttctgacttaatataaagattttagtctataaattcaagtaccatttccacagcatctcacaaattttgattcatcatttttcacctgaaatacaacagccccctaacctgtttctgccttcagtcaggaacccaatccaatgaaaccaatctatcctatatatttctgctacattgatatgtccaaaattccctctttagaaatgacgaggcacagatagcaagattaaattcttttttttctttttagaggcagggtctcactctgtcacccagagtggggtgcagtgatgtgacaacagctcactgcagcctccagctcctaggttgaagtgatccttccacctcagccccctgggtagctgggaccacaggtgtgtggccaccacacccggctagtctttcatcgtttgtagagatgggctctgactttgtcacccaggctggtctcgaactcctgtcttcaagctctcctccacctcggcctcccaaagtgctggcattacaggcgtgagccactgcacctggccaaaagtcactttctgtagtgtgggacatctttatgctgcgtcctcagctgtgcctgtggcctctcctcccacagctgcggccccagagcagcacgtgatggggactgtctgcaggtctggcaacagtcccacccacaccatccagcatgagagccgcccagccacccgcccgaaagtgcagtgatgaagcaggaggatgattttatatatcatcttaacacatttaaatgtaaaaggccccacaaggctactgccctcatactggacagggcagctcccaccagacagagcctgtcacctcctctggggacatcacagtggctacacagtcctacttggccgcactgtaggccgccttctctcctagcatcattctgatgtaaataaggaagtaacactatgtgtattggaatcaatgagaaaattgagttgttcagagagaacacaggtcacaggacaggaacctcatcaaaatcagtaaatccagactgactcaggaaagataaaccttctcagtctagaaaattaaacttcggcatagaggaggaacttatacggtgacccccatgatggcagatgaccccgtgacagcaaggaggatgccctctacattcctgcctcaccggcagcgcgtgacagagtgcttggaacctgtgacggcaaggatgccctctacattcctgcgtcaccggcagcgtgtgacggagtgctcagaacccgtgacggcaaggaggatgtcctctacattcctgcctcactggcagcacacagcagagtgctcggaaccccgtgacagcaaggaggatgtcctctacattcctgcctcaccagcagcgcatggcagagtgctcggaacccatgacagcaaggaggatatcctctacattcctgcctcaccggcagcacatggcagagtgctcggcaccccgtgacggcaaggaggatgccctctacattcctgactcaccggcagggcacagcagagtgctcggaacccagaatcacctgcacatttgctgaaagaatactagaacacaagtctatttccaaaactgacactaaactatcctcagcataaaatccgcctcaaggatgggttcagaagcacaagtttccagtttacctctcaactttttcaaaaaaaaaaaaaaaaaagctttaaaaatctaacaatagttctcaaactctttgacccaaagagcactttaaagactgttgaaaaccttaaaaagcttttgccagtggggctaatattttgatatttgtggcattagaaagtaaatcaaaactttttaaaaaacaagatgtcacagtcacagaatccactggctctcagaaccctcccccacccccaaacagacagccagccttggaaaaacccactgtgcactcaggagacaaagagtcaacaggagacatggccgtgtcattctggaaagcacaacactgcagacatccctgggagggtctcgaacccctgagggtccctgggctctgttggaagcttgctgtcccagaggacacgggaccgggacattctactgcaaaggaggggcaaggctgaagtcagatgctgatccctgagagggcagcccaagccatgcatgctcacacatggaagttcttagttcatcaaaagacacagcagtagctccacccacatcacagaatggcctgctgcacatgggttctagtatcttcctctcagtcacatcagggaaccacatgctgcacgtgggctctaggatcttccacagccacatcagggaacagtgtccttcatctgggctctagggtcttcctcccagtcacatcagggaacggcgtgctgcacgtgggctctaggatcttcccacaatcacatcagggaacggcgtgctgcacgtgggctctgggatcttcctcccagtcacatcagggaaccacctgctgcacgtgagctctaggaccttcccacagccacatcagggaactgcgtgctgcacgtaggctctaggatcttcctctcacagtcacatcagggaaccacctgctgcacgtgagctctaggaccttcccagtcacatcagggaaccaaccacctgctgcacgtgagctctaggaccttcccacagtcacatcagggaaccacctgctgcacgtgagctctagtatcttcccacagccacatcagggaaccgcgtgctgcacatgagctctagtatcttcctcccacagtcacatcaagggatcgcgtgctgcacgtgggctctaggatcttcctctcacagtcacatcagggaacggcatgctgcacatgagctctaggatcttcctctcccagtcttgggtggaatgggcacaacacaagtctccaggttttcttttccagagttgttggttggggaaaaaaaggtgataactaaagctagaatctaagctctaactgagagtttatcaagtaaaggtaatgaagtgcttaaaatcgactccaatacattctaggtgctcaataaatgccagctcattcacttacttcccaaatcaagctcaagttccaaaagaaagctatttataaagagaagatatgtactatgatgaagagctttcataagaattcattacaaagtaaggtcatgggtttagaaatgaaatgagaaaatacatccagtagaggttaaatggctgagtagattaattattaactaggtcaattatgtaagcaataacaaaattatttctgggctgctaaaattcagtcattgatggggagaatggaacaagttggaaaacactcttcaggatattatccaggagaacttccccaaccaaccaagacaggcccacattcaaattgagaaatacagagaatatcacgaagatactccttgagaaaagcaaccccaagacacataattgtcagattcaccaagattaaaatgaaggaaaaaatgttaagggcagccagagagaaaggtagggttacccacaaagggaagctcatcagactaacagcggatctctctgcagaaacccgacatgccagaagagagtgggggccaatattcaacattcttaaagaattttcaacccagaatttcctatccagccaaactaagctttgtaagtgaaggagaaatataatcatttacagacaagcagatgctgagagattctgtcaccaccaggtctgccttacaagagctcctgaaggaagcactaaatatggagacgaaaaactggtaccagccactgcaaaaacataacaaattgtaaagaccactgacactgtgaagaaactgcatcaactaatgggcaaaataaccagctagcatcataatgacaggatcgaattcacacataacaatattaaccttaaatgtaaatgggctaaatgcccccattaaaagacacagactggcaaactggatagagtcaagacccgttggtgtgctgtattcaggagacctatctcatgtgcaaagacacacataggctcaaaataaaggatggaggaatatttacaaagcaaaaaaagcatgagttgcaatcctggtctctgataaaacatactttaaaccaacaaagatcaaaaaagacaaagaagggcattacacaatggcaaagggatcaatacaacaagaagggccaactatcctaaatatatacatacccaatacaggagcacccagattcataaagcaagttcttagatacctaccaagagacttagactcccacacagtaacagtgggaggctttaacaccccaacgtcagtattagacagattgagacagaaaattaacaaggatattcaggacttgaactcagctctgggccaagcggacctaatagacatctacaaaactctccaccccaaatcaataggatataccttcttctcagcaccaaattgcacctattctaaaactgaccacataattggaagtaaaacactcaacaaatgcaaaaggatggaaatcataacaaacagtctctcagactacagtgcaatcaaattagaactcacagttaagaaactcactcaaaactgcacaaatacatggaaactgaacaacctgctcctgaatgactactgggtaaataatgaaattaaggcagaaataaataagttctttgaaaccaatgagaacaaaagacaatgtaccagaatctctgggacacagataaagaggtgtgtagagggaaatttatagcactaaatgcccacaagaaaaagcaggaaagatctaaaatcgataccctaacatcataattaaaagaactagagaagaaagagcaaacaaattcaaaagctagcagaagacaagaaataactaagatcagagcagaaatgaaggagacagagacacgaaaaactcttcaaaaaaatcaatgaatccaggagctggtttttggaaaagatcaacaaaatagatagaccactagccagacaaagaagaaaagagagaagaatcaaatagacacaataagaaatgataaaggggatatcaccactgatcccacagaaatacaaactaccagagaatactgtaaacatctctatgcaaataaactagaaaatctagaagaaatggataaattccaggacacatacaccctctcaagactaaaccaggtagaagctgaatccctgaatagaccaataacaagttctgaaattgaggcaggaattaatagcctaccaaccaaaaaaagtccaggaccagacgaattcacagccaactcttaccagaggtacaaagaggagctggtagcattccttctgaaactattccaaaacaatagaaaagaggggctcctccctaactcattttatgaggccaccatcatcctgataccaaaacctggcagacacacaacaaaaaaagaaaatgtcaggccgatatccctgatgaacatcaatgtgaaaatcctcaataaaatgctggcaaactgaatccagcagaaagccgatccaccatgatcaaataggcttcatccctgggatgcaaggctggttcaatatatgcaaatcaataaatgtaatccatcacatcaacagaactaatgacaaaaaccacatgattatcccaatagatgcagaaaaggcctttgataaaattcagcatcccttcatgctaaaaactctcaataaactagatattgatggaacacatctcaaaataataagagctatttatgacaaaccaacagccaatatcatactgaatgggcaaaaactggaagcattactttgaaaactggcacaagacaaggatgccctctctcaacatagtattggaagttctagccacaatcaggcaagagaaagaaagaaagggtattcaaataggaagagagaaagtcaaattgtttctgtttacagatgacatgattgttatttagaaaaccccatcatctcagcccaaaatctccttaagctgataagcaacttcagcaaagtctcaggatacaaaatcaatgtgcaaaaatcacaagcattcttataccccaataatagaccaacagggggccaaatcatgaactcccattcacaattgctacaaagagaataaaatacctaggaatacaacttacaagggatgtgaaggacctcttcaaggagaactataaaccactgctcaaggaaagaagagaagacacaaacaaatggaaaatcattccatgctcatggataggaagaatatcatgaaaatggccatattgcccaaagtaatttataaattcaatgctatccccatcgagctaccattgactttcttcacagaattggaaaaaactactttaaatttcatatggaaccaaaaaacagagcccacatagccaagacaatcctaagcaaaaagaacaaagctggaggcatcacactacctgacttcaaactatagacaaggctacagtaaccaaaacagcatggtactggtaccaaaatagagatatagaccaagggaacagaacagaggcctcagaaaagaacaccacacatctacaaccatctgatctttgacaaacctgacaaaaagcaagcaatggggaaattattccctatttaataaatggtgttggggaaacaggctagccataagcagaaaactgaaactggaccccttctgtacaccttatacaaaaattaactcaaattggtttaaaaacttaaacgtaagacgtaaaaccataaaaactctacaagaaaacctaggcaaaaccattcagtacatagacatggccaaagacttcaatactaaaacaccaaaagcaatagcaacaaaagccaaaattgacaaatggcatctaattaaactaaagtgcttctgcacagcaaaataaactaccatcagagtgaacaggcaacctacagaatgggagaaaatttttgcaatccatccatctgacaaagggctaatatccagcatctacaaagaacttaaacaaatttacaagaaaaaacaaccccatcaagaagtggacaaaggttatgaacagacacttctcaaaagaagacatttatgtggccaacaaacttagaaaaaaaaaaaagctcatcatcactggtcattagaaaaatgcaaatcaaaaccacaatgagataccattccacgccagttagaatggttatcattaaaaagtcaggcaacaacagatgctggagaggatgtgaagaaacaccactgagggaagtgtaaattagttcaaccattgtggaagagtgtggtgattcctcaaggatctagaaccagaaataccatttgatcaagcaatcccattactgggtatacacccaaaggattataaatcatgatactataaagacacatacaaacgtatgtttattgcagcactgttcacaatagcaaaaactcggatccaacccaaatgcccatcaatgatagactggataaagaaaatgtggctaaactagaaaatctagaagaaatggatacattcctcgacacatactctctcccaagactaaaccaggaagaagttgaatctctgaatagaccaataacaggatctgaaattgtggcaataatcaatagtttaccaaccaaaaagagtccaggaccagatggattcacagccgaattctaccagaggtacaaggaggaactggtaccattccttctcaaactattccaatcaatagaaaaagagggaatcctccctaactcattttatgaggccagcatcattctgataccaaagccaggcagagacacaaccaaaaaagagaattttagaccaatatccttgatgaacattgatgcaaaaatcctcaataaaatactggcaaaccgaatccagcagcacatcaaaaagcttatccaccatgatcaagtgggcttcatccctgggatgcaaggctggttcaatatactcaaatcaataaatgtaatccagcatataaacagagccaaagacaaaaaccacatgattatctcaatagatgcagaaaaagcctttgacaaaattcaacaacccttcatgctaaaaactctcaataaattaggtattgatgggacatatttcaaaataataagagctatctatgacaaacccacagccaatatcatactgaatgggcataaactggaagcattccctttgaaaactggcacgacacagggatgccctctctcaccactcctattcaacatagtgttggaagttctggccagggcaatcaggcaggagaaggaaacaaagggtattcaattaggaaaagaggaagtcaaattgtccctgtttgcagacaacatgattgtttatctagaaaaccccattgtctcagcccaaaatctccttaagctgataagcaacttcagcaaagtctcaggatacaaaatcaatgtacaaaaatcacaagcattcttatacaccaacagcagacaaacagagagccaaatcatgagtgaactcccattcacaattgcttcaaagagaataaaatacctaggaatccaacttacaagggatgtgaaggacctcttcaaggagaactacaaaccactgctcaaggaaataaaagaggatacaaacaaatggaagaacattccatgctcttgggtaggaagaatcaatatcgtgaaaatggccatactgcccaaggtgatttacagattcaatgacatccccatcaagctaccaatgactttcttcacagaattggaaaaaactactttaaagttcatatggaaccaaaaaagagcccgcatcaccaagtcaatcctaagccaaaagaacaaagctggaggcatcacactacctgacttcaaactttactacaaagctacagtaaccaaaacagcatggtactggtaccaaaacagagatatagatcaatggaacagaacagagcctgcagaaataatgccacatacctacaactatctgatctttgacaaacctgagaaaaacaagcaatggggaaaggattccctatttaataaatggtgctgggaaaactggctagccatatgtagaaagctgaaactggatcccttccttacaccttatacaaaaatcaattcaagatggattaaagacttaaacgttagacctaaaaccataaaaaccctagaagaaaacctaggcattaccattcaggacataggcgtgggcaaggacttcatgtccaaaacaccaaaagcaatggcaacaaaagacaaaattgacaaatgggatctgattaaactaaagagcttctgcacagcaaaagaaactaccatcagagtgaacaagcaacctataacatgggagaaaattttcacaacctactcatctgacaaagggctaatatccagaatctacaatgaactcaaacaaatttacaagaaaaaaacaaccccatcaaaaagtgggcaaaggacatgaacagacacttctcaaaagacatttatgcagccaaaaaacacatgaaaaaatgctcatcatcactggccgtcagagaaatgcaaatcaaaaccactatgagatatcatcgcacaccagttagaatggcaatcattaaaaagtcaggaaacaacaggtgctggagaggatgtggagaaataggaacacttttacactgttggtgggactgtcaactagttcaaccattgtggaagtcagtgtggcgattcctcagggatctagaactagaaataccatttgacccagccatcccattactgggtatatacccaaatgactataaatcatgctgctataaagacacatgcacacgtatgtttattgcggcattactcacaatagcaaagacttagaaccaacccaaatgtccaacaatgatagactggattaagaaaatgtggcacatatacaccatggaatactatgcagccataaaatgatgagttcatgtcctttgtagggacatggatgaaattggacaccatcattctcagtaaactatcgcaaaaacgaaaaaccaaacaccacatattctcactcataggtgggaattgaacaatgagatcacatggacacaggaaggggaatatcacactctggggactgtggtggggtggggggaggtgggagggatagcattgggagatatacctaatgctagatgacgagttagtgggtgcagcgcaccagcatggcatatgtatacatatgtaactaacctgcacaatgtgcacatgtaccctaaaacttaaagtataaaaaaaaaataaataaaataaaaattatttaagtgtaaaaaaaaaaaaaaaagaaaatgtggcatatatataccatggaatagtatgcagccataaaaaacgggtaaattcatgtcctttgcagggacatggatgaagctggaagccatcattctcagtcaactaacaccagaacagaaaactaaacaccacttgttctcactcataaatgggagttgaacaatgagaacacatggacacagggaggggaacatcacacactagggcctgttgggtgctggaggactacaggagggatagcattaggagaaatacctaatgtaggtgatgggttgatgggtgcagcaaagcaccatggcacatgtatacgtatgtaacaaacctgcatgttctgcacatgtactccagaacttaaagtataataaaaaatatatataaattaaaaaattcagtccctggggcaaccacagtagctctactgcaagatgagtggtcacagacctcgagctgccaagtctccctagaagccacagccctttccttgtgaatgattccagtcttcgcggtcggttcaggagaaagaaaaaagcagacagaaaattgtgaaatctgtctattggtaataaactaacataagctcctcttatctcacaccttattgttaaaaccacgtgagcatatactctaagtaaattatagtatatctaaatttagagaactcacaactagattcctgtaacagcaagaaacagcaaagaataaggaaacccagtaatgaccccatgcccctcctgctttcctgaagggtggctgccatgacacataaaggggagttgctctgtgttggctacagaaaatgagaaccccacctgagacttcacaggcaatgcaaaggtcatggggtgcgctccatatgccaatcagtcattattgattaaaacaaagatgagaccaggtgcagtggctcacacctgtaatcccagcacgttgggaggccaaggcaggtggatcacttgaggtcgggagttctagaccagcctgaccaacatggagaaaccctgtttctactaaaaatacaaaattagcaaggcatggtggcgcatgcctgtaatcccagctacttgagaggccgaggcaggagaatcgcttgaacccacgaggcagagtttgtggcgtgacctgtgtcacaccacagagatcacaccattgcactccagcctgggcaacaagagtgaaactccatctcaaaaacaaacaaaaaaagatgagtacccaacttttaaaaactacaacggcatccatggagtaatagtgctttccattatatctcaaataaatgacacttcaaggactgtcttcctaatcgttcatagtatcttctacacagtaaggcaaattctaccacctgtaacctatacacagtaagcttgattccctaaagagaaggagctgtggaattggagaccatcatctgtgcaggtgcatgagctgacaccttggtgtcaccctgggtgcagaattggagaccatcatctgtgcaggtgcataactaggacatctcggattcaccctgggagcagaattggagaccattatctgtgcaggtgcataagctggacatctcggagtcactctgggtgcagaatcggagactatcctctgtgcaggtgcataactaggacatcaaggtcaccctgatttcctctcatgttcctccatattaacccaaccttcaggtcctattgctattatcttttgagcatttctcaaatctcactggtactgatttttttttttttttttttgagacacagtctcactctgtcgccgaggctggagtgcagtggtatgatctcaggtcacggcaacctccacctcccgggttcaagagattctcccacctcagcctctggaatagctgggattacaggcatgcaccaccatgcctggctaatttttgtatttttcatagagatggggtttcgccatgttggccacactggtcttgaactcctgaactcaagtgatctgcccgcctcggcctcccaaagtgctgggactacaggcatgagccacagcacccagccctgacagatatctcttaagtacacatcagtttcaggcattcagggttgtttggactcccccactttcagcccatgctccatgctgctgctaaagtgatcttcaaaccctgactggcccccactgtcccttcacctaaaatattctagtggatcccatcatcttcaggatcaagtccaaattcccgagcgtgatgcacaagatgctataacccagccgctcctacctaacttcttgccgttccccaaatgtgtcacactccctcatcttccttcaaaatatagaagccaggcagtatttcaggtgcttggcctacacgaatgaacagaacagagatcctggcctgtgtggacctcgtattcttatggaagaaagtgagaggtggggaggtggatggtggaagaatggctgagtagtggggtaaatggatgaaatgtttgatagatggacggatggtggacgtaaatggatgcttgataggtaagtagatgattggcgaatatgtagacagatgcagagaggttgataaatggatggatgattgacaggtaggtaaataacgaatacacagacatgcagatagacagagtatcatgtggttataatggcgatggagacatgagtcaggatggggaacgggagagattgtgtgtgaagaggcgccatatttcacaattttacaaaaacaggagaaatgaaccgtgcttctcacgttgggtctagcttcccctccagagcagagcctgcagactctgagctgaagtgtcggtctcctccacccatcctgccactctcagccaccccctctgccatgtgcctctctcttccacaccttcctgcctttgaagaggtgaggtaaggtgcacggatgaacagaaaacgcaccccaagccaagagataaccatctcctactacacccacctctctcaggcttttatcaagagagaagaccgtgagacaaccacaacccgccatgcttatctcgtggagtagctgggattgtgaagatggcatgatccgaaggtaaacacagggtttatcaacacccctgcagcatcgtggagagagagagaatgtaggaaacacgcagtggcgactgacgcggatctcctgtgtggtaagatggccggccaaagatgggcttgcatcctcctgcgaggagcgaccccgtgtgatcgtcagccattggacagcctccctgaacttcagtttcctcatctataaaatggaagatagacccccactggcctctgtgagaactgaagccatgtgaactcagcctgcgtgcatgtctgggtgtgttgtgtgttcacagacagggtgtctgcatggcagcactgacacacagtgagggaagcgttggtcacaggctgacagtacgcaggtgcctccacactcctgaactcgacaggggcctccgagacacccacatgagtaagagaaggtctcaatatgtgtcggggcttaagacaggtgtgaaacaacagagggtggatttgggaacaaattctccttcattccatccgcacacattttcctgggtcacagcctccttggagaaggcagcaggggcgcccaggaggtggcaccagcttttcattcaggctctcaggtgtgtcctcttttgcatgggtgacactctctgaggccataaaatctcctctccagaaagaggagcagagccaggaggccaggcagacggcaactgaggatgcagaagcagctaatcacatgagcctgcatggacagagagattcattacagcacgactgacactcacaggcttcctcgaccaccaggtgagttccgagactcacaggctttcctcgaacaccaggtgagttccgtcatcccttagcctcacttttttcttctgacacagaagacaacagtcacgacttcacctgcttatcatgaaagctccatgtgagaacaatgtgaggatgccagtgaagggcatttgcaaaacaaagggattcacgaatcgggtccatcaccagcgatcgcccctaccctcaccggtgccctgggaactacaaaagaattcacaggtaattttcttttaaagaagcaactttaacctacatgttggaaaaactctctcagaataattcaaacattaatcacagcctgagtttttgttgttgttgtttttgagatggagttttgctctgttgcccaggctggagtgcagtggcgtgatctcggctcactgcaacctccgcctcccaggttcaagcatttctcctgcctcagcctgatgagtagctaggactacaggtgcccaccaccacgcccgacagcctaagttttctgttgctaaattaatgaaatttcagctggccaagcccaggtggcactggcaactcagtctccagacaaccctgtgcagacggcatcataaaacacagatgaaagacaggaaacacataacaatgtatggttttcatttctgtttagaaaagtagacctagaaaacaaatcactgatggtaagaaaaagaaaaaactatactagcaaccacgattaaaaagttatttaacagtgacacctaaaaaagaaaaatttggcacgagattataatctttttaattaatatgcaattctgaatagtagccaacatgggcttgtaaaccacgtgaagagctatttaccggacactggcgtctcccgagagggtgtgtccgtgcagaaagctggaggcccctcgcgtgctgcaggtccacgcccactgcacttctgcctcgcccagtggctgggcacaggcaccgtcctggcacaggtggcagatggacgtattgtatcaccccaccccgtgcttacctgaccgatagcgctcatctcgtgaccctgaagaccgtcggcggtggtagcgagaggcggaggaaggagtgacaggagcccggcgttcttgcggcaaagcttggtccacccctggatttcaataaaaacagcagagtgaggtgtgactgtactcagcggagtcagcagactctaacaaatcatgccctccatccccacagcaaagccagagctacccacgggactgggcatggcggcgcctcagagcccacagacaggagggccaggactgaggaggaagctctcccaccgccagggagacccctcctggctagacgccgccacggtccctttcacagcacaaaggtccactgacaggcagggagagacacaaactcagccacaggtggcaactgaattcctgggagtcaggattagagcaacagggcccaagacatagactcaagttatgaccttttaatgtaataaatatacagaatgagctgtataagctcttaagaaaatttaaaagtatatttgttattaaagtaattgttaaaataaatcttagataataatttaacaatataattcaggtaaccaggacataccatgaacgtccagctttgctcattccagattactctctggaaacttactccattggatgccaagtgttttaacagattatgttcgactatgaatcacaattacttggtgaataacaaaaaacattaatgcggtcagataaaaacggtttaatggtattggtcaaaacattgatgtgaatccacctgtcacatattgattacattcaggcaataacagggtggcaaggaacacaactagacaaaactaagcccccaaaggaaggacatcatcatcacagttccacgaagaactactctgacaccacgggaacaatatcaccccacagttccatgaacagctctgataccacagaaaggacatcatcctatgtcatccccacagttccgtgaacggctctgataccacagaaaggacgtcatcctatgtcatccccacagttctgtgaacggctctgatatcacagaaaggacgtcacccccacagctccgtgaacggctctgataccacaggaaggacgtcatcctatgtcatccccacagttctgtgaacggctctgataccacagaaaggacgtcatcctacgccgtccccacagctccgtgaacggctctgataccacaggaaggacgtcatcctacgtcgtccccacagttccatgaagaactgctctaagagtgagcaccaatcactaatagatgcttcttcagaaatggatcagtaatatctgattgaaagtaaaccagaaataaaagttttaagttaacaaaagaaatatttagtccctggttttccatgatgggctcttatgagagttgtagagtctgtggacttcatattccttactctggtggtttctgaacatcagcttttgatggtgcgtgtgtgggtctcatgtatcaggctggcgaattcagaactaagttaagcatggctcctacaccgtcattttgctaagtttcatgtgcttttctttcagggcatccaaatcaccatcagttcctgaggactgaactgtctgctgctccaacctcttccagtcatcatctacaactgatcttttaaaaatgatcttcaattacctttttatcaaacagatgcattttaggaaatcaaagagtattatcaagtctcacatgaaaaacagtagctacctggcacttacattcataaacatggacttaccacatgacttcctgaattgtcctttttagacaccaccccttacgccactgtggtcatcaacatcagcgtccgcagtgtgctacaaataccgttctatcttacgcttttcaatgattctggagttaatattttatctattttccactatcttggcttacaatgtacctattgccaatcctttcacaattctccagcagaactgaaaaactctttcccataccttcctgcccacgatcaaacactgacaacctggtgagaatctgttcaattttcctggaagtcctcttggagcccccgccccagtcccaaacgtgctaccgtcactgggccacgcctttcttcccgctggctgtggctgctgtgttggtcacttgttctcatgctcttcaatgccccctcgtctctccacactcccgtgctaaaggagcaccttgaatgtttcagaaaggaagaaccagaaggaacacttgggggccccacacatccgaaagtgcttctctttctaccccagtgagaccgagtctttcgcctagatacggacttctgggtgaaaattacttttattcattgcctttcatttccattattggtgagaagttaaacttcactctgatgctataatccttatgtaatacccattcctttctcttctccttcaataatcttttattcattcccactggaggagctgcaagccaggttgtaatatccattcctttcttttctccctcgataatctttttgctgcaaatcaggtttttcttctcacgggggcacaccaccaaatctctccccaaggaaggcttcaacggggctgtttcgtttgcccgaagagccctctcctctcctgtttccaacacaggcatgttcaccctctaacctggagcctctgttgtcagtatcatccccaaatctggagcctcccagtttaatttctccagataacacacatggctgggaggaggaggaaaagcggccgcctgcttcctggacaccgttctctgggctccatgtgtacagcacccatggctgtccgccgtgtctgcatcttggctttctccattttgctaaatgatgaaccacaaatttctctaacttctcttgtgctgtggacttatatagtcactgacagcacagttgggagaaacagataaaggcacacttccaagttgccaagcgtatccagtggcctgacgtttttaatgtttcaccttcaatctcagtaccacacctatctggtccactcaaacaggcttcctgtgattacctccaaccctaacctcctcttggtgcccatggacgatggtgcacggagttccaggctgctgctcggcttctcacagaccttacatgtctgatctcagaaagctacttttgcataccatcctcgtgaatatctcctaagtggaaatgtaaagtttgcaacaaaagtctgaaaacaaatgaataaaatagaagaactagcttctacaggttgcaataagacggcaaaagaaacgagtatgaatgtacatgtttccttcattcattttcctttgatgtcattccaaacgaggctgcaagtggcttaacgatatgttcctggaagaaaaaagccacaaataggcgtcgctcaactggattccagcctgtgaccgcacagggcccaggggcagcagaggggcatacccactgtccccgtcacagggaaaccaagcatggctgctggaacagatacctctgggtagcacaaacatgaacaatcactaagacgcatgactgcagcataccgctctgcgctgctgagggctcacgttcacagtcacgttcagtttggggaactgtgattgaaaaccagctctcaggagcatcacaggaagactagaagccttatgacagaaggcgtggtcaggggagagaggccggcatggtccctgggaaggaggtatccccagggagatggggtggctgccttcacacactcaagagtctggagaacaaagagcaaggtctcttgaggcaagaaaacggccgagatggagatgaggttctcctcccaggagcacctgctcagctatcatgcattggccacgtgaggcaccagctcagatccggtcctccggggacgggagatcccatgcctgcggtcgtggccccaatccgtctggctcctgtcattctgtgggatcctaggcaagtttgtgaactttcctaggctcagcctcctgcctctggacagaagcagcagtagctaacactgcagccctggcctaagcatttgatgcgtcactcattcctcagcacaaaaagcaccaagccaggactattacttctgctgttttcttgacaaggaaatgcaggtgcagaagtgatccatgagtgcgagcggcccggtgtcacccttgtgcggtgtctgaacattctcccgtgactgccttttcatttgcaatgggggcccctctcccaggcccctccacaccctctcctgagagcagaggctgtcattctcctggtacctgcagtggtgtccagagcctcaatctctgttacaagaacaaaatctggcttgttttgaaaacaggaagaagcatttttggaatcccattatgaaaattaagaaaacacggaaactgctaaaatttcagatccaagaatgaatcttggagcaaggaaaagctatcaaggtcgcccgaaaggggcatctgttgggatcctggagaagcaggcaggaggtgaccttgctctcggtggagctggccacaggatgggctcgggaaataattctgaaccctcagggctcccacagagggctggaacatttccatttaaatccaaacgtcagtgacatttttactttcctctagaattacagcaagaccacaaataaaacttgagcacagacagcaggagatacaaggtacacagaaggaaaagaaggcagtgaggccagcacaggaagaaggaaaaggtcaaagaaacaggcttagcaaagtcagcaaagaatagacaaatggatggaaacacacacaggaagaatggaggaacgaatggagaaaagaatggatggataggaggtagagaaggaagggaaggaagagacgggaggaaggtggatggataggagagaggagagggagggggagggaggggagggaggggaggaaggtggatggggaggaaggtggatggggaggaaggtggatggggaggaaggtggatggggaggaaggtggatggggggaggcagggggaggaaggtggatgggtgggaggtgggaggtggggaggaaggtggatgggtgggaggtgggaggtggggaggaaggtggatgggtgggagatatgaggggaggaagggggaaaggaaggtagatgggtggaaggtgcataggtgggagatggggagggaggaaggtggatgggtgggaggaaggtggatgggtgggaggaagagaagaaaaatagatgaacaggaagtggtgaatagataggaggaaagcggagaaaaggaaagaataaaggagagagaagaaagagaaggaaagaaagaacgagaaagaaaaggagagagaagaaaaaggaaaagaaggagagagaaagaagggaaggaaggaaagagaaggaaaacaagagagaaggagaagggagaaagaaaaaaggagaagtgaaggaagcagagagaagaaaacgagagagaagaaaaggaaaagagagggaaagaaaagacaggaaaagagagggaaagaaggaaggaaaagaaggaaagaaaagagaaggaagggaacagaaagtagaagagaagatagaagaggaaaaaagaggggaggggaggggaggggaggggaaaaggagagaggggaagggaggggaggggaaaagaagggaggggaggggaggggaggggagaagaagggaggggaggggagaagaagggaggggaggggagaagaggggaggggaggggagaagaagggaggggaggggaggggaggggagaagaagggaggggagaagaagggaggagaggggaggggaggggagaagaagggaagggaggggaggggaggggagaagaagggaagggaggggaggggaggggagaagaagggaggggaggggaggggagaagaagggaggggaggggagaagaagggaggggaggggaggggagaagaagggaggggaggggagggggggaggggaggggcagacggggagggcatgctgggggtacagacacaccccaattcccatctttttctcactcatctcatgtccgggcatgccgggggtgcagatgcacccaaattcccatcttattctcactcatccagtgtccaggcatgctgggggtgtagacacatccaaattcctgtcttattcccactcatcccgtgtccgggcgtgctggggctgcagacacatccaaattcccatcttattctcaactcatcccgtgtctgggcatgctaggggtgtagacacatccaagttcccgtcttattctcactcatctcgtgtccgggcgtgctgggggtgtagacacatccaaattcccgtcttattctcactcatcgcgtgtccaggcgtgcagatacatccaaattcccatcttattctcactcatcgcgtgtccgggcgtgctgggggtgcagatagcaacgtctctatggctcaccttagctcccagagaagatagggggaggaagagaggggtagggagggaggaggagaggagggccaagaggctctcctgccctccttccccagcacccaggggcaagcgctctgggctccacagaggcctccacaggagtgtcctgcaggagaagcctgctctgggcccttagtgaaactgccggggatttttctgtattttcaggtctgtcccagagcagtttctaaatccagtcccattctctccaggtctcaattacatgctcttgttcacatcgtaaaactttctaaaataagtgcaatcaaggactttgccagaaagcaaacaggacaactgttgtaaacactggtaagaaatttaataattttccttgtattcactgggatgggaacatcatacaatggtaagactgaaattccattctaagcacctgccctaaccccatgaattctcacactgcttttttttttttttttttttttttaagatggagtcttgttctgttgccaggctggagagcaatggcgcaatctccactcactgcaacatctgcctcccaggttcaagtgattcttctacctcagcgtcccgaggagctggaattacaggcacccatcacgatgcctggctaatttttaatattttttagtagagatggggtttcaacatgttagccaggctgatcttgaactcttgacctcatgatttgtccgcctcagcctcccaaagtgctggaattataggcatgagccaatgcgcccgtccccacactgtcctcctttctatccatctttcatgagcccaaatctttgccacacatcagtatatatttgcttagcaacccttttcctattataatgttttaacttgattagggactcatacactggaaattgtcagtgatccagggacgggagagtctgacgtctgcatctcatccgccagcctgagctccagtcgacgctcactggatgagggttctcatccggcagcctgagagccggttcacgctcactggatgagtgtcatccgccagcctgagctccggtccatgctcactggatgagtctcacccgccagcctgagccccggtccatgctcactggatgagtctcacccgccagcctgagctccagtcgacgctcactggatgagggttctcatccggcagcctgagacccggttcacgctcactggatgagtgtcatccgccagcctgagctccggtccacgctcactggatgagtctcacccgccagcctgagccccggtccatactcactggatgagtctcacccgccagcctgagccccggtccatgctcactggatgagggtctcatccaccagcctgagctccggtccatgctcactggatgagggtctcatccaccagcctgagctccggggtccatgctcactggataagactcatccaccagcctgagctccggtccatgctcactggatgagggtctcatccaccagcctgagctccggtccatgctcactggataagactcatccaccagcctgagccccagtccacgctcactggatgagtctcacccgccagcctgagccctggtccatgctcactggatgacggtctcatctaccagcccgagctccagtccacgctccttggatgagatgccaatctcaccatcaggaccgggccttcacgtttctgcactttgcttacacctcggatttttcacaaaacccacgtgagcagttccaaagtgggtgctaccctccccactggagacacaccgcatggcgtaggctcagctgcactccctccatagcggctggcgcctaagacgaggaatgcgattcattaaatgttgctgaaaagaccaggaaataaacgtacgggatcaaactgacagctccctgtggcagaacacgtctccggcagctaagcgtggtaccctgtgaagtgccgacgggagcacggctgatctggaacacaggtgattcacctgtcactacagcaacgcggtctagaaagattcacgctatgtcacaggcaatgccatctggacacccacgtttcccctcctctgggatttaagtttaaaacacccttaccctgtgagctgccacatggcctgagaccctaagtggaggcaacctgcccgggacaggtccccgggaccctccagcccaggtgaggaggcggtccctccccagcacgtctaggaagcgctgccttggggtcaccagactgtaactctcatggcacaacaagaatacggacccactgcgcacctgccccgggaaagcacagcctctgctgacacgaggaatcagaacaaccaacggccagcccaggtgaacaggccagggccagccagccacgtcttctaaagacgacagaacaaaatggcatttacgtacttaagaaactttctcattccgtatgtaaccaaagtgcaaaattcacaaatgccaactgcagggacctcctccctcacaactgtcaaagcccagtgggagaatctgcaacgggacctcagaggaagccctctccgtggcgacagggcaaggcagccactgcaagcaacagcactcaggccagagcagctgttctcatgagaacatgtgatccagtcacaggatcaaacactgggatgggagccaagttctgaaaagataataaaattccactgattggatggtgctgaggtacatgttaccctctgtcatttcagtcattaattagcccttacatgttaccatctgccatttaaatttacccaaatcaagaataaaaataaaactgcagcccagatagacacctgaggcagtggaaggtctccggtgcctgttcagggcttcacgtggatctgagcatcatgcggacacggtggcgtctgccctcagggacactgcacatccatcctcgtaccacggtagggacggtcactcagtggggcggggggaagtgagggctgccccggcccacccccacaggcagactcagcccctccgtgccgcacccacacatccatacagcaaatacctgcccaatgtccactttccgtgagcaggcagccggggcctcaggtgatttacatactgctgctgggggttggggtggagacttagcgtttagtaaccaccacccaactatgacagtggtatttcagagacaggacgacatggagatgggaatccggatggtctgactgaaggatcaggggagaaatccctcaggacagagcatccaaactgagctttaaatgccacctggacacggccaagtgcacggcctgagcagagttcctcatgtggatgcagcggcatggctgtcgggagggacagcggcgtggccatcgggagccctggtagcagggaggaactgagacaagtccgtatttgtgatttgactcaacagttggacagcacagtgcaagcctgcaggccagaggcctccggtgcagacagtgtagagcttaactcacactgaccatgggaggcctcttcctggagaggctgctcacgcgaccccatgatggaaaaagtgtggggcttaactcacactgaccacggatacctcttccctggagaggccgctcacgtgacctcatggagagaggctgtgccgcacagacaaacccccttacagagtccttgtaacttgcacctgggcatcaagctgtccggctattgaaggaaaagcaagctgggcttggagaggaataccagatcttcataaatcactcaataccaagaaacatttcacagacaaacacataagaagttgctgtgagaaagaggagctgtatctgagcaaagaaggttccaccatttatagccacactgaaattttactctctaaatctccacggcctgtgtcatacaagcagtgaggccttgttatccaagtcgacactgttattaagatctctctgaagaggctgccaggcagtggattttatttcctaggtttacaactttgactgggcttagagactgatgagggatgggtttgaaccgcagaagggtgagagcgaagtgggcagcttccctaagcagcgtcttctccctgaagatgatcttccaggcaccctctctgacccttctttcactgcatgtataactcacatttcttcctggctccggacagtcttttcctcaactagatttaggcaggtgctcagcaccaacgctcacttctgaatcccgactggaggccccgacagacgctgccctcctgagcagctgggacgtgcctggctggcctagggaacagaacccccattgtagctcgtaattctgcatcccaaacaacatcctagaaacacttttagaatagtttctggaggaataggaatgtaaatgttaggaaaaaagggtggaagttaatcagaacacaaaccccttacaggcaagtgcgcagcagcacaggggaacaagaaagaaagatgttttccacgaagatcctgcacaaaggaagtcacgtcccatggggccaaccaagaaagcagcctcggctttggaaacgtctgcgttccttgctgcttcccaggacagctgcacatggtgcacacttgcgtgtcacaagcaacgtctccaaatgaaggtcggcagggaaacagcctcgctggggccctagcaccgctgtccggagtccccccatcctgagtctggtgtctgggcctcaatcaggcggcccgggccgtccttctcctgttttcctcacgtttccggcagataaattctgaaatggacctcgtggctaaaacccagccctgtcgccttctcatcagctctgccccttgctcctgagagggtgcgagggaatcagcccagagagggctcctgagagggcccagagaggaggaacgcagtggaggccaggaggcgaggcggggtgtcctcttctgagaccccagtggccaactgtaataataaagtttgcctctatgacttcattttaccaattttttttttttgagacagggtctcgctctgtcccccaggctggaacacagtgccacaatcatagctcactgcagccttgacttcttggattcaagcaatcctcctgcttcagcctcccatatagctgggatcacaggcacccaccatcatgcctaattttttcttttgtagagacggggactccctttgttgcccaggctggtctgaaacacctggacctaagcaatccccttcctcagcctccccaagtgctgggatcacaggcgtgagccaccacccccggccttgtatgtgattttaaaacacattttgaagtgtaaccctgaacacgaacctaaaacttccacctgcatatgattttcttcattctggtggaaaatgcactgaactccctttttgcatcatgaaattcctgtattcaaaatactgtccgccaaagtaattcttacctttgaacagaatccttacctctaagaacatactctatgattaactgctttttctatttcaaaaacccttactttgctctttggagatggaaatctcaaaatcactccttctagcagatctcagaggccaagacccatcagctcatcctttaattgggtctttggctataagatgaaagtctgtagaataccagtggctttaagaagttttataatttgtcacgcattcttcttaagtgttttctaagtggtgcccaactgagaaaggggaattgtaaaagcaacgttctacttcaataggaaacgcagaactgggccctgattcacagggacagacctggtctctggcgagctctgggcctgtggagcgacctggctcactggagaatgggaccctcaggcccccaaggccacaccctacacgtctgtacgggatggcactcggcgggtggcccttttctaatgtgtaccctgctgtggggctggctctcagcaaagcagcgctcaccgaaacgaaagtaaaacagaggccggttccctgcggtgctggccacccgctcccgagccgcagcttctcggacgtcgcacaccccgatgtgggcagagcggaatgttctcctcggcgctccttcactgtgctgcagtctacaccgaaccacggcagctccattcgctgctgtaacaagttgaaaaaaaactaattaattcaaactttagttttttttaaatttgttacagcgctgagcagagctgccgaccccatgcaggacagcacacagaccaccaaggggaccacagggcacgaccgccctctgcgcccggctaaggccagggccaccgcgggaggcacggtgcgctggagaaccgtcctggcaagcgaggaaccgcttctgtttcacttttgtttggcaaggcaagaaagttaaaaccaacagcgtccgtggcctacagtcagaccccaccttctgcagcacatgagggcacctgcagaggggaactcacagggacagggcgggggcagctgtcgccccatggctctgcgagaagagaatgagggagggggcgcaggccatcaggggatctacccagcactgccctgaagcctctcgccccagcattccagcccagccctctgctccccttctctcgggttcctcggcgtctatccctgacttaagcctctgctaagcaaggtccacagaaacatgttcactgttacatcactgtctcaaaaatcaaggcaagaaaaacacgaaatgaaaacaaaactaccaatagcagaatctccacaccgtttcctgcagcctgagcctcaggaaactttccttactgagtcaacaggacccggacgggcctcgggaagaacagaatcggggtttgtgcaggtgtggacatgtgcatccttaaaccttctaaaatcttctttcaatggtaagaactatgcaagttcaatttccacctttaaaatttatgttgctagcctttatgtttgaggaagaaactgcttgtgttagctttaagccattcctcaagcctaccaaattttcaaggtcgctcttgggctgaattgagcttgccagctgggaactgaggtgctagaatccccatctaatatgagattctttttcctgacatttacagaacccagctcaagtgcaggaaagctgccaatctgcacacgtagaaacgctggcgggaaaccgactgcccttctcaagaatcatcatggatgtttgcaaccacatctcaacacacaaccagctttcacgattgccaagtcctgggcggggtatcacagcactgtctagatttggcctgtgccaccaacagaagccttggattaaaccagaatcaatagtaataaatagctctctaaaccaaatatgttgaaatcactaatgcactcatatttttacgattatagcattttaaagtaaccaacccaataccgatctctacttatagagaaaacacctattaggcacacttatagaaaaatcctctgtgccttgtatattcacacagcacgtgtgatcactcaaaggaactgaatgcctggagggtgaacgccagacgcctcctcctgccgactgggaagcaagggagcgtctgcctccagatgtttctctggcacatagtgaatgcgggaaatgagaggactcatgctactcatgggggttacctactcggaggctgcggaaggtaggctccaattaactttgacctcttcttttcatatcctttttgtgtgatgtcacctgcaagagaaggaaaatgaagttcagtatggtctccgtggatagagcattatcattcaacggtgcccaagaagacacagttatcacagtatcttctgtgtgcctcattgttagaattttaaaagcaagcactgcacatcaaacaacttcagttcctcccctgctctcgaacaaaagcccacagcatgtaagtcactaaaactcatttgttaaacacacgcctgtttctggccccttctgtatttatccggatggggtccagggttagacccctgccatctcatccccacccgctggcacaggaagccaagcctggtggccggggctctcgttaactcagtcaacgacagatcctgcagctgccagggccgggatggccgacaccagcacctattggcatcttcttcattaacaagatgttttctaaccaagcaggtcggtcacaaggacttgaagccgccacagtgtttttgaaaaaggagtgacaaaggctaagggaagaagcaaaaggtgtgaaacctgcagaaatccagaagacaagagaaaggtgcttgtggtgaggcaagaatccacatgttaaagctcacagacagccacggacgcgcagcagccatgcctttcctggagccagcgcaagcacacaggacaaagccacctcatcgacacacagaggcccttcccattcacaagctccagcacacacagaatactcattcgctgttcatttttttggatctgttgtattgttttctaagactgatcaaaccataattccaagaagagtgaaaaattcaagctttaacaaaaatatagcaaatgaatgaaaagttatcaaggtacacacacaagctggtcaactcacttttcctagtgaaaggcgggcagtctcggatgctgcctctgcctccacggctgcctccaccaactcacagctcatgatacaggttctcgtctcccccacggaacacaaggctgacgtctcaacacggagccaagaaccaaatgacacggaacccgcatccgcccatcaatgagtgttttttttttttttttttttttttttttttgagacagtctctctctgtcgcccaggctggagtgcagtggcgtgatctcagctcactgcaagctccgcctcctgggttcacaccattctcctacctcagcctcccgagtagctgagactacaggcgctggccaccacgcccggctaattttttgtatttttagtagagacagggtttcaccatgttagccaggatgatctccatctcctgacctcatgatctgccacttcagcctcccaaagtgctgagattacaggcgtgagccaccgtgcccagccgatgctaactaggtagctggccactgacaacaaaggacaatttctgcagaaatgttaaagcttgccgggcactccacaccggcagccatcagctgcccactacggagacgctcagttgcttttggaaatgccttgttaacccgttttacaaacaatgtccaaaatctgaaccacagaagcagccacatgtgcacgtgcttgatttaaatcgagcccccagtcaatcagcaaagaaaatttccagacaagactttaataaatcctaggttactatcatctctcaaaacctaggaggtgggaaagggtggcagcactgagtaacttccatgccccgcattttcccccaaaccagggtctgggaactaagtctcgaggctgagcccagcttccaggccacttctggagacacgctctgtgctcacggcctgctccttgccgagctgcaaggcaagacagttcagtgcagctcttcacaggagggtttgctggcccatccccaaagatgaaagtgtttaatccttataagaacttattttacagatgagaatttgaggcacaaatggtactcacgttcctcacccaggaccacaaatctaagacaaaactctgtccagctccaaaaccatgtcccatgaaaaccacacctagagtcttccactctaaagctggtgtggtgcccagaggccgcagccctggcttcctgggctttcctcgcatgttcacgccccgtacatcctcctgactccataacctgcctgggaagtgcccttctccgaaggaaacgggactctacttcctgctttgccctctcccagcccctgccctgcatggatgacgcctctgggtacccacggcataaatcacacgctgtagcttgcgtgatgtcgtggatgactgttcatggtttatttgtaacacacatgcacagttatccttaaaaccagacaatgtcccatagaactgtgccccaacccagttgtcttacaaactgaagccagggtgctcctgcgtgtaccacatgtaccacacacacagacgtctgtgcctgacgcagagagacctgcaggtaagtgactggctgggagtgcgctgaagacctgggcagacgcggggtgatcatttacctgttcagttactggggggcgggcaaaggggaaacttacgatgattctatcccaaaatgcagaagacgacggcttgatgtgcatgctaccccaaagccgaagcgctggatgccacggccctgagaccaggctcactcaggccccaaagctcatggctcacaaactcctgctacgttttcatggaaaaagtccagttatttttaactctggactgcctcagcatctggtagacagaggtccaccagattcccatgatagactcgctgcaggtttacatgagcaaaccttctagcagcacttttacatgccgtcctttattttgaagaaccaatgtttcccgtgcgaatacaatcaggtcataggtgacaggtagataatagatgatgcatatagacagacgacagagatgatggacagatggcaggtggtgggaggtgagagactgacaggcagaagctagctggctgactacacagtatcctccctgaacagcttcttgggttgggcccaaggcctgaccttcaatcaatgccacgctgtcactagggagacggtggctctgacagtgcctggtgcttcctccatttcacactagggacacagtggctctgacagagcctggtgcttcctccatttcacactagggacacggtggctctgacggtgcccggggcttcctccacttcacactagggacacggtggctctgacggtgcccggggcttcctccacttcacactagggacacggtggctctgacggtgcccggggcttcctccacttcacactagggacacggtggctctgacggtgcccggggcttcctccaccttcacactagggacacggtggctctgacagtgcccggggcttcctccatttcacaccagggacatggtggctctgacggtgcctggtccttcctccatttcacaccagggacacggtggctctgacagtgcccgagccttcctccatttcacaccagggacacggtggctctgacggtgcctggggcttcctccaccttcacactagggacacggtggctctgacagtgcccggggcttcctccatttcacaccagggacatggtggctctgacggtgcctggtccttcctccatttcacaccagggacacggtggctctgacagtgcccgagccttcctccatttcacaccagggacacggtggctctgacggtgcctggggcttcctccatttcacattggttcaggctgaatgatcaattaattcctgcctctcttctctccctctcaccttgcgtccatcagggcatgtggtcatcagcatgcagctacgtaaactaaaggcgcaaatgctccgaaagagggcacatccttccccacgtttctaagctggggccatcacgtgtctgttatcccgctaggcgtatccactgctcacagcctgcttgttcatatttccccaaacctggaagcgatgggaacgtcatccaaggctatttcgaaagtcaactcccgtctccggggaggccctccgggaggctgggtctaaggcacaccctcaaggctgctgtcagagaatgtgaaccacaggagcccctgccagagcgctttccacgtaaaattccaaacagcatattttcctgcttccacatcaaggtacccatttatttaatttccttttcactttatgacagaaaagtaaatgcagtaattgtaacctcagtgagaaaaataagtgatctctttagaaacattttctacttcattaaaaaaacgccacttatgttattctcagagactttccgtaagaattaaaatttcagaagcagaaattaaaatcacaaagaggagagatttacacacaagtcctactttggaagtgaaaaccccagtgaggcaaagtcaccagcagaaggtcgaatgagactgagggatgatgcttctttccctccctgaagggaacaattctttttctcacttatgttgcaatccagagtttcagggcaaaacccaatcttacaaaagcagggaaaggtctgcctggcaaacgcagggttaagatgacagaacagacagacacccggcccttgtggcttcctctcggcctcaggcacgcaccagccaatctggcccaactggaaccagtgcagagccagtgctgtgaacgtcaggctcaagacacggacacttgggagccgcgtgaccctaggggatgaaagaaacgggccacagagctgcttccacagcgtggctcagctccaagcacacagacccactcggcagtggcggtttccatgtgcagtgtcaggagactatttaatgctggaattaatagtttatataacaaagcaatcgtttccatgttgggaattctacggctgtcaggagccctggtgctgctgctctgagcctattgctttataaggagccaggaggccccggaaggcaaggccgcagcctcgtttttaaatctccgataggcttcttcgttctccagcaggcgctgcagaccggtgacagctcctgtgtgtacccctcgcctgcactggggacaggggcaggaggacctgggatgtcctctcaccccagcaagctgagcacagcagggtcccccatgggccagctaactagtgtgggtcgcatttttctcatggataaaatattggagatagcacctatctacttgctgccgcagatggagagatcaaacacacaggatgtgaaggtctcaaagcactaaggacacaagaaaatctttaaaaaaagttcaacaagcattcattcagtatctatttcacattcaattcatgagagacgtccaagttgatgggaggactcatgaacacagacctgctgtgcaccctgcagggccacaggtatcgccccgtcaggggagggaggcaaagaagatggaccacagaaaaccaggggctaggaagaagctcagaatcctgaccccagaaaacaggggctaggaggaatctcaaaatcccgaccccagaaaacaggggcaagaggaatctcaaaatcccgaccccagaaaacaggggctaagaggaatctcaaaatcctgacccctgagaacccagttgttgctctgctctgatgtcaaccaccatctagggaccccagacgccgcgggcccccgtgtcggagacactccagctctggggctgaggctccttgccccaggcataccccagacagcagacagaagggtcgctgcaagaatgcaaacgtggtgagcctctctccccaaactgcgttggaggcttctccctgctgtttgggctgtgaccaaactccccacagggcctccaagtccttcccaacctggccctgccgccttggccacccgtgctctgccatggctccacctgcacctgctgtgcccatcaccccctcattctcacaagcccctgccacatttccagtgcaagcatcggcagcttaaattccataaagatcttttaaataaggtgccagggtaaacataaagcctgcactaggattcatacattcacctgagctttttgcttaataaaaaacattatttattgttatttagtgcctagcgccccgcactctgggcgacagagcaagaccctgtctcaaacaacacacacacgcacacaaatatttaattaacggtaggagcaggaaagaaacacattttagacatgctgttgcagtaagatcttactcgggccaggcaggtggacaaggtcacttagagttttacctttttggttttaaatttgtattgtcccctgtagctcttctctttggtacgttaagaactccagttagaaaggggattaaaggaaacagcatgtttggaatccattctatttgtaacacatggatcaaaagaacaggtgaaagatcaacagaagttcacaccaccgcagtggtcttgaaaataagcttctgatgttaaaagagaataatgtagtattaacagtccctgaagggcttagaaatatgaatgccgatggaattttttaaaattcaaagcacgtgtgcagtgtgccgcgcggagcagaggctttgtgagtttgaggagactcctgtcctactgcagcctcgaaacaccccctcccttccagtccctggcaagactgggggctctgcacgaggtccccggagatgccccagcagtcatcctggccagtgggaagatttaaacatgccagtttcacacaaaaccgctgtcataacttgctaaaaactcttcaggcaagcataatttctccagtgtgtcctgggagttagaaatccctccttcacacaaaaaggaaagaaacccgacctgtagaaagacagctctgagaagactatgccgtattaaacacagctacttccctttcccatgacattgattctcaattttgcagatctcaggcctcagcagtaagttggtttcagtggatgttgtatttacattttttggtgttggggggagcgagaaggggcaaggtagggacaatgaagcccagcttccattatttccagctggacatcgagaagctgacgtgtagaagaatacccagcatggcccgccgcctgctgtgggctcttctcagatggccgccgtgggcctcatggcttgagagcaagtctctcacgctccaccctccgcttcccgacagacagagggagagaccccctcagagttttttctttggattgggagggaacatgagcatgaggacaggtggacaggagaaaggatggaggccgattatccacctacaaagtcggggtcttactgccaactttacagacaactatgtcatttaaacactccacaagcactatcatccttgtttcacagatgacagtctcagcaagtccgagatgcccaaggcatctggccaagggccagactggtggcaacaaagtcatcgtgcagaaccgcctggcccagtgccgccgtcctacctccaactacaggagacacttcagatgccccagcagggagaatatcacagccctgctgaagggggaggaggacaactggaataaacaaaatccacgtcacttccaggatctgaaaagtcacgctggaccaccccgaggtgagtggcagagtggtctatcccgagtgctgggccacaggggatggtcatgaacacacactatgtgacccccttcttcatcagaaagtgcttttggagaaacaagagaactgctaaggctatcaaagatggaatcactttgacagcagaaagaagtgggctaacctcagtaaacacaaaagcgcatgcagtccagagtcctaaaccccaggaggaggacatctctgtcaacagagctccatggtcactgtgtgttcacaccagagtcagaggcgcgcagtgacctcagcaccggggccaacagagcctcaactttccacaacacatcaagcattatcttcctattttagaagcacacactccctcacccagagtctgactttaagtctctgcagaatcatttaagcagctgcatagtagctacggctttctgctcagttgcctttttaagtcaaagctaccaagagtcaaagcaatccaagaggctgctcaaccagtcaatatgcagcatgagaaagcaaagctcagagagaggtgtaatgaggaggctgctcaaccagtcaatatgcagcatgagaaaggaaagctcagagagaggtgtagtgagcagtcacgccacctgtgcccatgtcaggggaaccaaggggatcagaaacgtaaattctgcagtgttggcaaagatgtggagcaaagggaacccttgcacgctgttggtgggagtgcaaagcagaacagctgctgtggaaaatagcatggagcatcttccaaaactagaaacaggactctatgatccagcaatcccatgtctgggtaaatatccaaaggaatttaaaccagtgtaagggagagatacctgcatgctcacatccactgcagcactattgacaatcacttcgatgtggaattgacctacgcatccatcagtggatgaacagagaaatcatggtgtatggacaaaacaaatactattcaacttaacgaactaaattctgccacttacaaaaacatggataaacctggaagatattacgctaagtgaaataaaacaggcacagaaatacaaatactgcatgatctcacttacatgtggcatcttaaaaaagtagaatttgtagaaacagagtggaataggggttagcagggactggggaaggggaaacagggagatgctggtcaagggcacacacttcaagaaaaaatgagtcaattctggagatcgaatgtacagtgtggtaactacagttaataacaatgtaccatctgcctgaaattcagttaacaatgcatcatctgcctgaaactgggtaagagaatggatcttctgtattctcaccacacatacaaattaactacaaggtgaggaatgtgttattaatagcttgaaggggcaggaaaaaaacctgaaatccttcccctcctcctccctaaaaactataggttttgaatgttggtttgtgtggaaaaaattctgtttcttctagcgactctctcagtgaacaaaaaaaaaaaaataaagcatgctgaagtacagtcacccttggtgtccgtgggggtgggttccaggggtcaggatcccaaagtctgtgatgctcaagtccctgatagaaaatggctcagcatttacatagaacccacatgtgccctcccgtgtacttaaaaatctctcttactcgcaataccccaatgtgactgctgagtacacagaacccacagtgccctccccatgtacttaaatctctacattactctcaataccccaaagaacatgagtgctgagtacacagaacccatggtgccctcccgtgtccttaaaatctctacattacttgcaataccccaaagtgagtgctgagtacacagaacccacggtgccttcccgtgtacttaaaatctctccattactcgcaatacctgaagaaatgttgagtgcatagaacccacggtgccctcctgtgtacttacatctctacattactcttaacaccccaaacaacttgagtgctgagtacacagaacccacggtgccctcccgtgtacttaaaatctctacattactctcaataccccaaacaacgttgagtgctgagtgcacagaacccacggtgccctcccatgtacttaaatctctacattactcttaataccccaaacaacgtgagtgctgagtacacagaaccaatgcatgccctcccgtgtacttaaaatctctacattactcttaataccccaaacaacatgagtgctgagtacacagaaccaatgcatgccctcccgtgtacttaaaatccctacattactcttaataccccaaacatgagtgctgactacacagaacccacggtgccctcccgtgtacttaaaatctgtacattactcgcaataccccaaacaatgtgagtgctgagtgcacagaacccacagtgccctcccgtgtacttaaaatctctacattactcccaaataccccaaacaacgtgagtgctgagtacacacaacacatggtgccctcctgtgtacttaaaatctgtacattactcgcaataccccaaacaacatgagtgctgagtgcacagaacccacagtgacctcccgtgtacttaaaatctctacattactcgcaataccccaaacaatgtgagtgctgagtgcatagaacccatggtgccctcccatgtacttaaatctctacattactcgcaatactccaaacaatgtgagtgctgagtgcacagaacccacggtgccctctgctgtacttaaaatctccacaggccaggcacggtggctcacacccgtaatcccagcactatggaaggccgaggcgggcagatcacgaggtcaggagatcaagaccatcctggctaacgcggtgaaactccatctctagtaaaaatacaaaaagttagccaggtgtggtggcgggtgcctgtagtcccagctacttcagaggctgaggcagaagaatggcatgaacccaggagatggagcttgcagtgagctgagatcgtgccactgcactccagcctgggcgactagagcaagactccacctcgaaatcaatcaatcaatcaatctctaccttactcacaataccccaaacaacgtgagtgctatgtaaatggtgggtgtactgtattgtttagggaataatgaaaaagtctacccatgttcagaacaggttaggccattcttttctttctgaatattttcacttttagtttggctgcatccagggctatagaacccacgaatatggaaggccaactctgcaccttggaaatttttaacattcagcaggcaggggaaggaatacaggctctcccctcccacacccctcattacttcctggtcattctgctgtgtcggctgcttctctgttgaccaacttcacagtctgtcttcatcagcaatggggcagctctggacagggagaagcaggcgtccttcacttgcgaactgtttgctgcggcaacgagctcaagaccttgtcttcttccagacgctcatacaaggaatccaaaccgtacgtagtgaggatcagtcctgccacacacagcaatgtcttggatccagagaagctgaacatgcagccagggctcctctgacacacgtaagaccatgcagagaagcgtccggtaatgttagggcacctggctagttccgccatacagatgggatgcagaggaagaatttcttgaagcaacattcatcatacatttggagttgaaatgcaaaatgcaagcgccaaaaaaaattagctattttggaataggttgggacagggaaaacatatgtcatgagatgaaaaattttttcttgagacaggtctgcctctgttgcctgtgctggagtgcagtggtgcagtcacagctcacagcagccttgaccttccagggccaagtgatcctcccacctcagccttctgggtagctgggaccacaggcaggcaccaccacacccggctaacagtgtattttttgtagagatggggtcttgctgtgttgcccaggctggcctcaaactcctcaagtgatccacccacctagacttcccaaagtgctgggattacaggcatgagccactgaatccagcctctgtcatgcgtttcataaacacagtacttgagttttcccaacctcttgctatccagctggcttccccggctgcagtgatgctgctgctgtttggcattggttgtctcttcacaaagggtggggaagcagatgacagggacacgctgtacacccagggaatgactgggctctaacaggagatgcctcagctgaaggaagtcctcagagccccttgaatctccacacctgagtgaactaattccactcacaatcagcagtccgggccacagaagcaggcgccagtggagatgcttgcctcccctcaggggtcctgctgacagaccccaccaggacgtgtagaacacagcgcagtcatgcttcttcctccctgctgcccagggggctctctcttagggggctcgtcagagatgcacctctgtcaagggatgactgacttccatttcatttacctgaagtttctgcccattccttcccagagaatataatttttcaatgaagaagtcagctcacctcaagactctgggctcaagcgtgccccaacctccatccccaagtacaaaacctcctctcagctccagcacacctcaggatgagccaggaccccactcaccgtttcccagtaacaccccaggcctgaaaaaagctactgctgtgtgggcgaattaaggaggcaatgcgcatttgttgagtcctgccagctaattatagataaaacaagctttctgagagctgtgaatgtggattttctatggtgttacttatctgcatgccggcatttctcaccaacgctgctctgcaccgcacagcactgctgactcggagaacaacttctgctttccttgaggaattctcaaccaccagttttcatgcaaggcactgactatgaaaacttcagtcctattattttgttatcctttttcagactttgaaaatgggctgctcaatgagaacagtatggctgaaccccacgatggtcacacagctgaggttcaccacacgcgatgctgactgactccttgtcagcattgcagccctgacccctcaatggctacacagctgaggtttcccacatgtggtgctgactggctgctcgttggcagcgcagccctgacagcagcatttgcactgtcaccttctccctgtgtggacggctgggctccccctctgtggaccgctgggctgcatcagtctgttttcacgctgctataaagaactgcccaagactctctaatttataaaggaaagcagtttgattgactcacagttacacatggctggggagacctcaggaaacttatgatcatggcagaaggcgaaggggaagcaaaggcctatcttacatggcggcaggtgagagggaggtgtgcgagggggaggacaggacctactgaaatagtaccatataatatctgacagagcagccaagggctggtggctgcaggtcgcaggaagggaacacagttaccaaaaaaacagatctcgtgagatctcccaatcgcgaggacagcataggggaatccacccccaggatccaatcacctccccaggttttgcccttggcatgtgggggttatggaaattacaattcgagatgagatttgggtggggatacagagccaaaccgtatcatgggctttactaacaccattttaaaggaactctgaaatgtctagttaccatctgccaaattgttgactttatcatagagcaagcatggatatgccagcccctcgaacttgttaatagcctaggtgctgactaggacttatctccagtaacctgaccctgccacaatgggactggggaaggggccccaaccctaagcccagctcttgctcgggtggattttgaaggcagacagggccactgagagcaagttcagacccagggaataaaactagggccccctcagcaagcgcagactcctgcaagccttcacagcagatgtgggttcagctgggccctcccctacatctgtacctgccagggacccctgcaggcaatgtgccagcttccctgacaaccacctctgtgctcatcagcgtctggggcaaaggtgggttcagagccaacccctggcctgtctcaggagcagggcccatggctacttctgtgttctcttcctgagacctgcagccaccagcccttggctgctccagcagacgttatacagtactatttcagtaggtcctgtgaccccacaagtccaggatacatgaagggaaagtgactgctccttagtaattaatcaaacaaatactgcagctttcacttggcccttgtttgggaacactgtacgtgcctaggttttacacgagaatttccaaatgccatagaaattatcctgaactttatttcctcattcatcccccaaatatttaatacctattgtgtgccatgcaatggacagagtacataaaacagaaatcctacacaaaacaaagtgcacacgaaacacagacacaatatcaccaaatgttcgctggataaaagatttaaaaagttgtattttaacttaaaatcttttaaaagctggaaatacagggatgcttaattcaatgactccaatgattttcttaaacaaatcacctcatctgggtaagcaatggataacaaaacaagacaggccaggtcccatcaggacaggaatgactgcgatgtctccccccataggtttcaggcttcagaaaatgctaagatctttctatcatccttaaagctattttttttctgacaaccttgctgtgtaaaataatggctcagtcccaaaaaggcttgtagttaatttaagaggcctgaggttttcttttggagagcggagggggcaaatgacctaccagaagttatatgtaataagctcaagttattccagagaagtttgtacacacattatgactttctctgaggccagtgagctgcgggcaaccctccaggaaacactgaggcttcctgtgcactaattcacattgtgtcaaaaatactgagttgcagggaggaaagcagagatgattcctggtgcaacatgtaaatgtggtaagattttgatggtttcactagctatttaaataataatgttgatagtacacactttagtttgtggaaacatcctttctagaagatcttgcccaacctttattaagtggcaataattaagaatatactttatttagaaggcaaataaagtagaatgtatgcagtcctatactcattgatacattatgagtagaacttgttaagatctctgctttgcaataccaacttttatgaaacaaacctgtttatgtaagcacatatgtattcaaggatttttataataatatgtttatgaaaacacatgcgttgataccatattaccccaattatagagggaagatgagaatatctgatcagaaagaatggggaggcttcatttaaaatgaaaaaaaggtcaataatcaaagtgcaaaaccgatcgaagaatatgatcgtattacaaggtgacttgcagaacaaagcagtccagacaggcaaaaggactggcacggagaaacacaactgagtgaaattacattgaattcaacacataggcaccgcaatatccattcattcaggaatatgcgttacacaccgaccacaggccaggcactgtgccaggtatttggcaatatcagaacacaaaacataaaacctctgcaccttcgtggcacttcaattcctggccaggtgtgctggctcacacctgtaatcccagtgctttgggaggctgaggtgggaggatcacttgagcccaggagtctaagaccagcctgggtaacatagtgaaactccatttctacaaaaaacaaaattaattaattgggtatgacagcatgcacctgtagtctcagttactcagtaggctgaggtgggaggattgctcgagcctgggaggtcgaggttgcactgagctatgattccaccactatactccagcatgggtgatagtgaccctgtctcaaaaacattcaaattcccacatcatagtttttacaacaccaatataccatgcaaccatctccctgataagcccaatcatttactggtcaatgcacagaatgtgaagatattatgaggcacacacaggaactaaacctacatgaatttttatcttttgctaaaatgagatttgggtgaactaaataaaaccaccatgagtgttcaaaggaaaatacttttcaagtgaactgaaacaaaaattaaaatctatgaaatgcagccaaaataatgatgggaagtaagctcataggacgaaaggctcatattcgaaaaaagtaaggtctcaggtccataatctaagcttctatgttaaactcaaagccagaaaaagacatcataatgagcacaaatcaaagaaactgaaaacagaaaggaggaaactcaagtcacaccaaaagcctacgtataaaaattcccaagggatctacaaaagtcagtcctagatccaatacctgagttcagccaagtcacagcacacagtcaaagtgtactctacgtattggcaattagtatttgggacctaaatgttaaaaacaacactatttacagtagctgtataaaaaacacttaggtatacatttaacaaagcacacagaggatgtgtatgaagaaaaccacaaaacactgaagaaagaaaggaaagagctacctcaactgagccacgagtccaaggagaagcggcaacacagtcaagacaccaattctctccacgttgaccaacagacttaccacaactccaacataaatcccgccaggacactgacctgcggacttaccacaattccagcataaatcctggcaggacaccgacctgcagacttattacaattccagcataaattccgccagaacactaacctgcggacttaccacaattccaacataaattccgccaagacgcctacctgcagacttaccacgattccaacataaatcccgccaggacactgacctgcggacttaccacaattccaacataaattccgccaggatgcctacctgcagacttaccacgattccaacataaatcccgccaggacaccgacctgcggacttatcatgattccaacataaatcctgccaggactttctgtagatgcagacaagctaaaagttacatgaaagggaaagaaacaggacaataaacgttccaatttaaaaactggcaaagatcgaacagacacttcaatgaagtggatggacataataagcactcggaaactaaaagaactgaccacaaaagagagtggcagtgctactatacataaatttaacaagcaaaataaaactacaagggagaaacaaatggaaccaagggctacaaagatgtatcttaaagctggcggaaaaccatggaagtgttcctagcctctttctctgagagcaccacctgaccatccaggagtcgtcactgacagacccaaaaccagtgggtgctaaccacagcttccaccctgagagggaagagtcatttgaagaacatccagcaatattccttcggctcttacccctctgctgtgccaaacaccgagttaacgtttgctggcctctatatgcacactgaggtctgcatttgtaaccgcatttttacatctttcaggacaggacaatcctcctttgtcccctatggttttcatcacggttctatatacacctgaaaatctctgccgcctacatcagacgttttgtctaaacccattactgtgacttaccctaaatttacaaccattgatttcaattccaagtccaaagactcatttccacagtaattattttactcagaaattaaattccagattcctgatcacacttaaagtcaactgctttcaacttctgggttatagatacaactggtctaattctgtaacctgagaggatttcatggaaatactctctcttcatctcacgacacacacaggtggtaactgcagccttcaacctaactgccttcctaaccagagcatgaaagagcaataaagagtatttatccccatctccttgggctggagacccacagcgtatcaatcactgtcaaatcactgttgtgcaaaaatcagttccaacgccctgtggagaataaaggccacgctggaagaggcacgcaagggaaacagccgtctgccatggggctcccacccccgagacggcaaatccatgcaggcgtgccgaggctggccacccgctgataccctgctaccatggaactattccaggcacgaactacctggaagtcctgggagagaaacccagcacacaatgttgccgtcagacctgcaggtgtgatccctagcacagccaccttaggccgggagagcgaggatgggactcagaagctgcaagatgaccatgcagagaagcacccacggctccgtgaccaagtctgaccatgcagagaagcacccacggctccatgaccaagtctgaccatggagagaagcacccacgggctccgtgtccaagtcacaagtgacaagatgagacgcttcccgtgttcccatgttctgtcactttaacactaaaaatttagtacatcttactgtttcctaagaaagcataaggcctgagtagcaggtggccgctaacctggttcttttcagcttcataacagaaggcaatagctatataaaccaaatcgcactatggctgcatcacggctttcattgcatgtcaaaccctcagctccagcggtgctgaccccgtcatactcagagaagaggtgagctcttcaatctccatttctcaacactccaagctgtttccatatgagctcatgtgactctcagtgctaggttcgttcattcattcattcattcattcagcaaaaccgccgtgaacccgcgggatccccaccctgccctccaagggatactattctgatgggacctgtgtccacacccatattactgcagcccagcacccttcccggaaccgtgtgcatctccccaaaagaaaactgtacagaaaacggcaacgggtccagtcatgttccgaggagcaattccaattgctgatgttttaaggcaacagactaataaccggcacctcatcaacacagagtcactaacttcccagcagtgtctctagtccctctacaaggatatacagatatacacgcaggagctatcttaggaggcaacaagacgctcttcaggaaacaggagaaagcaaaacatttgaggaacggacaggggcatctccaccttctactgccacaatttgtgtgttagtgatcaagccaaggttctcaacctttccaatctattaaccccctgcctgaggctctcgactgatccccagctgtacttcctggcaataaacaacctgcccagctgtgattcctgtgtgcacctgacaccagggagatggagctgcctgcccagcggtgcttcctgtgggtgcccctgaccccacaggagatggggaccacctgcccagctatattccctctgtgggcacctgacaccagggagatggagccacctgcccagctgtgcttcctgtgggtgcccctgacgccacaggagatggggaccacctgcccagctatatttcctctgggtgcacctgacaccagggagacagagctgcctgcccagctgtgcttcctgtgggtgcccctgacaccacaggagatggggaccacctgcccagccatatttcctctgggcgcacctgacaacagtaggatgctgcatgtgcctacactgacagctacagcatcatctcctgctgtaaaaactccctttcagaggtaacaggacaatggggcaggttttctcctggagaagtaaagaagctgagaaatccaggggattaggaacgcaggtgacaaaaggaggttgtgacatctacacgatgtcacatttggcagcacaagggagtgctggtatgtgctgctaggtactgttattcccagaaccacctcacactgcatggcattgacatgcttcccatgctcgttacccttcggaagacacatttaaataaccttgacttgctgggatgcagctggagagagatgcctggagaccaccagcccagagtcaaggctccattttctcctgcttgcaggacttctgcatgaagctaaggcatccaaatgtgcataagatttatgaagagcagacaagctgcatgacatcttctgagagggaagctgtgccatgtcaggggttgggacagcagcagcaagggggatcagcccaaggcctggggagaggcagttgggaaatctcagtgtgtgtagccctggggtctgaggctttcaactgtccatgtggctcccacagctcaagtccagcgtgtggtcatgacccagggcagggccactcacagagcacagttcatctcaaatgtgatggggacgctgaatgatacgccaacgtaccagaatagaatccccagtactcacatgcagaaggcactcccagcaacacgcatgcctacaccaccctgcaccaaggggctgggcactcctgcagtctgcagctgcctcctatcccccaacacacagtggcctcccgggacaacattctatttgccggccacagcctggagcccccaaagcacggaggaggggcttagcgagccacgcaacgttcccacctcacacccaggaaacgagcccctcactgaagtgggtcctgcacccgccagctgtgcatgatcagaggtgtgaggttatggacatggtcacacactgtgcacagaggtgtgaggtcacagacctggtcacccactgtgcatgatcagaggtgtgagggcatggacccggtcaaccactgtgcaagacgagaggcgtgtggtcaaggacctggtcacccactgtgcacgataagaggtgtgaggtcacggacccggtcacccattgtgcacgataagaggtgtgaggtcacagacccggtcacccgctgtgcacgatgagaggtatgcgaggttagggacctggtcacccactgtgcagtcagagccatgcgacgttacagacctggtcaccagctgtgcccaatcagaagcttttgaggttagggacctggtcacccgctgtgcacagaggcgtgaggttacggacctggtcacccgctgtgtccaatcagagacgtatgaggttacagacctagtcaccagctgcacacaatcagaagctttcaaggttagggacctggtcacccgctgtgtccaaccagagctgtgcgaggttacagacctagtcaccagctgtgcccaatcagaagcttttgaggttagggacctggtcacccgctatgcacagaggcgtgaggttacggacttggtcactcgctgtgcactatcagaggtgtgtgaggttagggacccggtcacccgctgtgtccaatcagaggcgtgcgaggttagggactgtgtgcgcggtgacggacctggtcatcagccaagattcctgatgtttccagtgtcatctcagcttccttcaaaacttgaaatctttagatatttcccaaaagctcgtccgtctttgaaaacgatacatatgcgcacaggtgagtttgttcccgcacattcctttcagtactgacgattgaagatcgaaggttagagcattccagcccagtgcccatgtcccaccccatctgtgaaaacctgagcacaatcagaggctgcagacaatctctgcatcatcctcagaaactgttcctgaccattcacctgaggccaccaagtttaaatgaggggcccaagttttaaaagacaggagaagacttttccacaatctttttctgaagacagagtccatgcgttgtatcatcagcaccatttgtgcctgtcctggtcaggaagagctgcaaccacgtctctgtgctcttccagtgcagggtgctgcccttccctccctttccaagcacagagcagctcctgatgacccagcacctctgctcagccaccttcccccaacgccttcctccctcacgccacagaggagctcgtgcagccaggctttctggctcaccaccgcgattcagtcacttacaccctcattccaggctgaaaatctcttctgaaaatatccaaatcttacccatgtcaggctccatcttttccccagagcccctcacccactccagagcagcatctccggtgcccgtgcagcctgggcgcagatccacaggctcagagtgcccaggccctcagcccctccatgtgtgcccttactcccttgctccccagcgttaatgcccccatcctcgatttcctggtaggcaaaagggggttaattctaacagtgcttacctaactggataatttcataccgcatccggcccagcatactgccttgataaatgacaggtcctgctgcactgttaccattgtgctggttccggatttcctgtgagccgctaagctcttcgcagcaaagaccactcaatggtctggtccaggactctctgggatggatggatgggtgagtggctgatggacaagtgtgatgctgaatgggatcatgcaaagctggccccacgtattttggtcaacgtaagaaaaaagcctcccatgtttgcttgctgccaccctaaccgcagcgtccagaagaagccacttaaaggcaactgtaccgcacatacaggagatggcgagacgagactggctggagatgggaagttgtgtactactgatcagggctgcatgacccaaaaaaggcatcactcgaaaacacggctgttccaacagcagtgctggaaggcggccactctgacccgaccgtccacctccagggtcagccacctggcacctcttggatgtctcatcctgggcaccccttcacagagtaaatgagccttttaacttcagcctgtcctcgctagaacactgactcccacctcccatgtcctgaaccggcctgttccagggactgctgtggacagacgagcaggcccaagatatctagtggcatttcctggcaaggacactcacgatgcttgaccatacaactaggggtcgattggttttttagactgactgtaattccctggtggcacgcgtggatactgattcacccggggaggggcatagaggagactgaaggaaaacccgtcctaaccgcgccaggtattcccgcacgcaccgatatcttcagacttctgcagcatcctcctcctacagacaaactgaagctcagagacactaaggagcttgtccaagaccagcaacaagtatgtgagcagctgggattcaaccaggtccttccctggatccatccgcgctgctccccctcccaccccgaggcagctccagatggacacagcaggtcggaacatcccacaccccaaagacagactacggagcagagccggcttccgcagcggaaactcacacacagcccattcccattcttgccgaatatctcagggactctgtgcggtaagggctgcaggtgtgacctcactctgcgccaggagatccgggtggtaggcagtgttttggagggtgctcgtccagacgagagagaggcatctaagggggctcataagcagatccatgagacacaggacacctcagagaagggccgacaaaccccacaaagtcgctcccatcctggagagcagcttggagaggacggggcgccgcagtctcctcccagcccacgcttcggcatggagagcagcttggagaggacagggccgccgcagtctcctcccaacccacgcttcagatgggtctcgctgcagcctgtggtgctcatcaggctaagcagcaagaggaagcttcccagggcaggagttctcctttcacagcaaaagtggcacaggcaatgcagcagggctacttcagcccagggctcaggaaccacggggtgcagcgcggcctgcagcaaaccagacacatcagaagccaaggtcccactttaacattcagtgacatcgaacggagggagttatctgtagcaatcgccttcctgggggacccgtacaacacgcatgaccactgaaactgactgagtcccttctaggtcctgggggctaccccactttacactcattggttccattcacaaatctatgtggggcagttgttagccccagtttagagatgaggaaaatgctgcttggagaaactaaatgataaaaccagacttcaacacaccttgccgtctccaagacccctgctctgtgtcctagggtctcaggggctgggtattcggcattttaagtgactaatcataggcagttttcttctctcctgcacctatatttagcctgaacgtgcacgtacatgctcagctgcaggtgcactgccgtatgtggaccagcaacgctctttcccgcctggggttctcgtgaccaccttccggaaagctctcgcctgctttacagccgtgccaggcaggcctgggcagccgcacagtgaaattactgcagggtcagagccaagtgctggctgagattttaacagcgaagacagcagagcaatggggataagctgaacaaaactctattgcagcacagacggaaatctagaagcaaaagaagctgacacccctgagagagcagctgactgcatctcactgtgacgttaacagcagcctgctgtttccagcgcctccgtgtgccggggtttccagtcagcatttgtgtttatctgctcttgagctgcctgatcaaacctccgtaaagatcagggatatctaaattgacccaatatctgcatgctggctgctcagagctggtggtgtgggacagccaggacatcacttagtcatacgggggcacaaacatgtcacttgccactcatgtctttatctcattaaaacctattttctcctgaatattgaccacagcaaagtctattagccttcgagatgcagttgaaacatcgacgtgctttgttcaagaggtttaagacacacgtaagtctttcttgccatgctcaatacacacagccgtttctgaagtcggtgtttctggaacaaaagccttggcctgccccagtgaacattcacgctgaacacactgtcgcgatgctgcttggccagccagcagggggcaggagagagcagcaggtgccagcgtggagttcctgcaaactcgcctcaatcaagggcggtgtgtcctgccaatccagcggcttcctccaaggggaagcggcctcttcagctgccacagcactgatttcaggcggctcagccaatggggcaacagattcaacagagttccatgtcgttaaaggaaaacttctgttaccaggcaaccttaatatcagattcaacgtaaaataaccaacaagattgtttccaaaccaaggtgctactagtgccttatccttcaatgctgcttaaacacggagaagtatgaggaaaaaagaacatagcatttacttcttaaaaaataacacgtcttccaggttcattttacccataaagacttagaactgtggcttccctagaggaacgtggtgggaggtggatcccgacactgacccagcctccccccacaagtcagtcacccctccacggggttcacacctctccaggccctgtcacctcaacaatgaagggtggcggctccgagctctcttcacagggagcaccgaacaggagctagagagagacacagacacacccacaaccgcttaaaaatcctgaaatgcaatacatatttaaggacttcattattagtttttcaaaactgtaagaacaaagtgagcctggctttaacctgtgtgacacgataacaccgtgtatatctgtcctttactgtctgttccttctccagctgctgctgcctggctggccgactgcgggagaagagcctctggtactcccgggaggccctcggtaaaagcgtgagcaccacaatcacctctcaggacaccgcacacgttagggtcgcccacagacggccgttcccagtgccttcttacaaaggcatgaacgggcctcctgctctttgtaaatgtcaaccttcctaagcaatgtcgtgttgacaatttttaactgcagtccacctatacttctttgtttctgtcttgtttttatcctagaggcatattattatggaaaattaaatttgcaaggttgaagcgttttttaaagttgacttctaatcctggaagggaaaaaaatgggccagatgtggtgctcacacctgtaatcccagcagtttgggaggctgaggcaggcagattgcttgagcccaggagctcaagaccagcctgggaaacatggcaaaaccctgtctctactaaaaataaaaaataaaaataaaaataaaaaattagctgggcgtggtgatatgtatctagtcccagctactcagggtgctgaggtgggaggatcacctgagaggtgatcacccaggaggtgaaggctgcagtcagccaagatttgcgttgctgcactccagcctgggcgacagagtgagaccccatctcaaaaaacaaaaagcaaaaacaactgtatacatcattatagaaaggagctggccgggcagtggctcacgcctggaatcccagcactttggaaggtcggggtgggcagatcacctgaggtcaggagtttgagaccagcctggccaatatggcaaaaccccatctctaataaaaacacaaaaattagccaggcatgatggtgggtgcctgtaatcccagctactagggaggctgagggaggagaatcacttcagcctgggaggtggaagttgcagtgagccgagattgcgccactgtactccactccagcctgggtgacaacagcgagaccccacttcaggaaaaaaaaaaaaaaaaaaaaaagggagctaatgtttttcatttaagggaagggagaagaacattcagtatttatacatctcacgcacacatctgcagtggggccctaaagtattcaagatacacattcctacaaatatagctcaaaactactcaccaagtttcatgctaaaagcacatgcattttaagagtgctacattatattttttaagcatctgtatccaatattttagcatactggcagttttcccttcaggtgctgtatgcctaaattattacatgtttagtcgttcatgttagaatttatgactcgctttagacaaaagaaataaacataagctactaaattaatgacttaggggaaaagttactacaataacttagaagtcaaactttgcaaactgaatttgttggaccatgtaagccagatgatcagtttttaaaattgtttgtcgcgtgtttccctcaaggacggaagtctcccctttactctcatccactgcatgctgcagcccgcacctctcatccaccacagcacactgcggcccgcgcctctcctccaccgcgccacaccacggcccgtggctctcgtccaccacagcacaccgcagcccatgcttcttgtccaccgtgccacaccgcggtccactgcgccacactgcagcctgcaattcaccctgtaccacgccttccacaccttacctgaaagtcactaagtataaccaagaaggaaatgaaaagtagataaatgacctccacccccaccccatgtccagcctgcacatgtttaaacattcatcaaagtaaaaccaaaaactcacgttagctcacgattgtaactggtagaatcatgtgcatggcaattttaaaagtctcattaagtaaaaacctaatcgaacctctcaagaaatacaaagtttatacaaaaagacatctgcaaacatcgacagtgaggaaaggacttcactcaccatccagcctgtcctggaagccacggccaaatgccaggttgtatagatccaaaaagcagaaaaaacagtgctgaaatgtgtacagtcttggcaatgtacaaattcagatgtaggatgctcagaaaccttgaatttccaatcagagaacaggaacatgagcaagttccccagcagtgcccaccttctgcctatagcatgtgtaacaggaatgctggccacctcggggggacagaggcttcctggtgcattcgccctgccagccgcacagctggccccaccacaaacacctgctaatactgaagaaccaccccccttccttgggctttgctcactctagccaggagagcgtatttacacagtgcattatcgactcagttctcgttcaatacgtcaagcttgttgaaggcatggcaaccccactcctggcccaattaagtgaactgagcagaacaaatgcccccagttcgacggcactcagtcacaacagcaacggccaccattcacagggtgctggcttcgtgccgggaacagttccaggcgtcttctttgtccgaggaatttacactgcaaccctgcagggccgttcgcaatgttcaccagagggttctgaggcagccaagtccaggctgtctgtgggcctcaccgcatggccgtccgtgtccccctgcagaccagacctcactccaaggaccgcgggttccagggctgccttgaggcacatgctcccttcgccacctcctcctggcccctgacaccgaccctcaccactgctgccaacaccgtatttcctcatggctcctgagggacctggtctttctgcacgtccctgctccctgcgtccggcttggaggatgcccgtatcaacgccaacattcacgtaatcaccaccccccttccatggggggctttatgcctaggagtctcaatatcagaatgtcggattcctgtgcttggaggatttattcccactgtggaagtgaagggggtaaaattctaggtgcctgcaataacctcatttctgtagctaagcaacttcagtagtagcaaaaaacaagctttttttaacttcttttatacaagctaaaaacaatttttacgtccacgttctcatcagctcccacctggtgagcaggcagatagtaattttcagaaaaacaaattgttccataattttaacacttagtgttatcactattaagaattataaacgttaattacataactatccaaaatgcctcagggaaaaaaatgtcatccaattggttctttaaagtgttacaaatgcagctgagttttaatagtaacttgtccataattgtcaaaagaatctttaaaaatcttaatactgaaagaataaccataaatggatataaaatacaaagcagaagagttaacatttgaggtagattgtggcctatatttttaacatatgcatagttatttacctagctgaagtacatccctctcctcctaggctcttccaagctgattttcaaacatagactggcttttggttcatgaaggcagatttaaaagatgtcaggatcgggccgggtgcagtggctcacacctttaatcccagcactttgggaggccaaagtgggccaatcacttgaggtaaggagttcaagaccagcctggccaatatggcaaaaccctgtctctactaaaaatttttgtaattagccaagcgtggtggcatacactaataatcccgctactcaagaggctgaggcaggaagaactgcctgaacccgggaggcagaggttgcggtgagccaagatcgcatcactgcactccagcctgggcaacagagtgagactgtctctcaaaaaaataaaaataaaaataagaaagccttcagaaaaagctatgagcaccgcccccacccaacccaagcaatcacacggcaatggttatcacctgattttcacacaatagataaaattctattctcgtctctaaacactatggtaaacacctgccatcaacccacagaaactcctgggacccaataacactgaactagcaagattaacaggccacacacggagagtttagctgcagaaagtgatggcactaagaatatgtctgtgctcaaaccagattccttgctttcggggtgaaggggcttccccaggaagatctagtccagtgggatggtttccacttccacgacgagaggaaacgagggggtttcctgaagccactggcatgacttgggtctctgtacctttgtcctccatcctgttatgggatgagggtgggctgaaggcaggttctccctacatcttccgggcaggaaagatggagctgacaagcagatgacagcttttccaaaatgttcccacgtttataacctgttgttgacctgctttccctggagatcagtgaagtggcatcattgattctcttccattagggacaaccgggcagtatgggaggcgggggagaggaggggggggatggggaggggaaggaggggatgggggggaagggaggggatgggggggaagggaggggatgggggggaagggaggggaaagggggggaagggaggggaaagggggggaagggaggggaaagggggggaagggaggggaaaggggggaagggaggggaaagggggggaagggaggggaaagggggggaagggaggggaaaggggggaagggaggggaaagggggggaagggaggggaaagggggggaagggaggggaaagggggggaagggaggggaaagggggggaagggaggggaaaggggggaagggaggggaaagggggggaagggaggggaaagggggggaagggaggggaaagggggggaagggaggggaaagggggagggggtggggggggacagggggtagggtggggggggacagggggttgggggggacggggtagggtgggggggggacagggggtagggtgggaggggggacagggggatgggggagggggatgcgcaggtgcctgctgtgcatggaacccaagcccctcgcagagctcaggatgaacccagtttccaggcccggggccatcatcagccaggagaggcatccgcggcacttcccagcaatggccacaggaagtaccaactcaggcccatcaggggcttcctcactgtgggggtttttaaaagtagagcacagaggttcaggtctagtggcacagtcaaacgttgacagactccatggaaacacggacttggcccctccatcccaccagcctgcatggccgcccctctccgctcccatcatacacatccccatccagccaagccccttctccttttcccttctccatttctccactggattcatcaaatcaaaccttgctgtccttggcaaatgtaccatgaatttacttactgcccagaacaaaagcacacttccagttaacatgacacccccactatggtagaacacagccctaattcagacattaggtgaaggaacaagggaggggagtcgagggcagtcctgagtcagcagctgttttctggggaaagcctctggcccacccaagcccgacgctccgccccacactgtcctggtgtctgaaagctccatgaagacagggtcactctgaccccttcacacccacaacgccgaagaggagcaggtgtttgggaaaagcctcctgctggcggtgaaggcaagaataattcctcatgatacccagaatgtcagaagaaaagaaggcaccatatggacgccttccaagtgaattttggaatgattctaccgaatgccattcatcctttttcagaacaaaatcaataccagaaacgtgtcaccagcagaaagatggtccctttgattgacggcttacaaacacaagtatgttacactgaatttatctcaagccaccctctctgtgataatataaaaggtctctttattaacaaccagtagcctttctcatctggtgctttttaacaagagggtcctgtaaccctcaggcattgtctaaacgtcaaatggaagcctaggatcctcttctgtgcagtttcaccacaaagtattttgacttgagccaaatcatgctattcctacacctccacaggaaactcaacgtttcatcaaggaaaggcagcatgatttctgctaggcagtttggtggggtgggcgtggggttgagggaacatcacatggaaagcacaccccgatatcaccagcctgacagccacactggccagcaagtcctggtcagctcggtctctgcacagtcacaggcatgaggcctggagggcggacacccagtgctgctgaccaccccaaggtcatggcctctgcctcttctctgctgacccgtcagttccaagcttctggcaacaccacctgctgcccctgctgcctgactgactccttcgtgaaaagcggcgttgccaggatagcttatgagtacaactgccaggaaagcagctccgattgatgctgaaaccctgctcttgcaccgctggcagctcccctggccctgatgtgtacgcacttgcagctctgaccttgctcagtgtccacacaggctttcccccagaaacgcacaggttgaaatcctcacccccaacgtgacagtgtcaggaggtctttgggaggtgatgagttcccgaagctggagccccatgaatggggtttgtgcctcagaaaggggcccagcaactctcttgccctcccactgtgtcagggccagagagaaggcgtgtgccaaccaggaaggggcccacaccagaacccacccatgctgcaccctcatgccaccttccaccctccagaactgtgagaaacaaattcctgttgtttagaggccagtcaatggtgttttgttacagcagccttagctgcctgagacgacaatgctcaccgtcctacagagatggctactcccctcttccagaaagaggtttaattaaaatccctgtctctcctcaccgccaccacagatcccacctccagcagttactaggattaaaggaaaaggaggatcattttagaccagcccctcgacgtcagtctgaagcctgtaactttgcccacttccatggtggccgtgtcaaactccccatgccagctctgcatctgcactgggtcccaggctctgcacagactcctccagctgtccatccagcacacccatttccccttctgctttgcagattgtccttcaacatccaacccccacctgcagcccaagggcttccgatccagccattaggggtgagcccagctgtgcactggagtccttggctcaggtaacccaggcctaagccgctggcaccaacgatctcctggctgcagggtctgcacagccactagctgccccggccacaccagggcccaggagggaaggcagaggaagctgtgaagctgccaacagctgtaaggggacaggggagcccctgggatgaggtggatgccatggaaggaaattcagagaaagacccccgggggctggatgggtcatgcccaaagcctgcactgctgagttttcgaggtttctgaactcattcaatcgctgacccacgcagcacgtttcctgagtgctgaccccgcgtggtattggatatggcaataaggcaggacccccacctcccctcccccacacatacatgggacctccatcctggtgggaaatcaggacgtgcacaggcctgggtccccccagctggcaccacgagcctgggaagagggccgtttcagatgcacagtgggtgcagccttgccaaggggcccagcagtcacctacactgccacagccaggctgagtcaggatcaaccgcacagaaacctgaccctctcaagggcgcacctgagctcattagggacagaaaccgtctcctgctcatcgctaacactttctctgcatgtctagttacaaacggacgacgcagtcttgaagcacagctgtgacgtggagacagatcccaggcctcccccctgctcctctacttgttgccattgagggggaggggccagtatggccacaaggctgcacacccacagccacccagccactgagacgtgggcctttgatggctgcttctcccaaagaacccttctccgtcttggagcacaccatggcgggcaggaagctccactcggagtaacagcgatggttctccccagagccaacggaggcccccaccctgcattcagcagtttacttacattctggaaaacatctgaattaatgggtaacactaaaatgaacaggtcatgcaaggaagtttagaaggtcgtgtgaagtctcagcaggcccaaaggtttccgagaaccaaggcggctggggtcgacatgcttacaggcaaagtttccacacgggccttcaacaagcagcgctcagcagggagggccgcgctctgggcagaacctcagaaccagaacatcagacgccacaaagtcacatcagagccgacagcaactgaaatacagcactttccgaagacgtgtgcgttacctgcagaaagttactagacattaatttaagatgggggaagaaaaggataaagttagaaataaatttaaagtaatttctgcatacaaaaaaaattctatatccactggctttctgggagtaacaacttttacatgagatgcacatcccagttggaaggagtttgggttttccgtgggcagagacagggctctccaggaaacatgaaccctttctcactcactgagccacgtgccctggggccgtcctgacctgtctgagcagctccctgctctgcctgcagctccttccgcactcccccgctgctcccagagcctgcactggcccaggatctcgtcttctgctgctgtcaaccatctgctgccaaagtttcactttagggcaaataagttggaaaccaaaaaattctaagaccccttgggctttttaacaatttgtcttctcagaaaaagaacactaattctacttccatggtttaatatgttgcctccatctgcatgttcatggatatgtgtttttatatatgttttaatcaatacttttaaagtcatacactgttggctacattcagtttaattacatttgacgttaagttttaaattcagtgaattcaggcactcaaaatttaagccctctgacatctattaatcaaatggaaatatgacaagtaggtattacaaaaatcaagagaagtatttaatataaatcctggacttttggatatttccacaaatgtaatgtatacattagtaaacaaacgagcattttcacaaatctttgaactcaaattccatttttaacttttacaggtaaatcaatatccatatgtgattttaagcagatcaagcatcagctcttaaaaacaaccagaaatgctgcaggcaaatcccaccaagcagcaaacaaaggaacagcacccaacaactgaacacctcccctgaggcatctggaatgtgaggattacgagcagcctgtggattctgaggtgcctgagtggggactcccgactccccaagtctaagagaaggcctcaatgataaggaaaactcgtcaaaaaatcatccctggccacatgctcatccctgcctgcccccaggcacatgcttacaagtctcgcttcctctctgccccccaaagcctgacgtgtggtcccagccctgctgctcactggggtgagaccatgagcatcactgcacctgtaaggggagaagccggtccagatataggatcctggctatcctggcagtgctcaagctcactgatactgtaattaactttgtagtgagttacttaatgcaaaggtttaacttttgaataatttagatttgtgtattctaatggggaaatcctgaatgtagaacacaggagacaccctcacacagattctatctggccagcactattttttgtttgccttttcaatagactttttaaaaagcggttttcggttcatagcaaaatcgggaggaaagcacagagtcctcacgtatctccttccccagcacatgcacagcctccatcattcccccacccccaccggaccagcatgtctgtacaaatgacagacccgcatcaacacagcaccaccacccagagtccatagctcacacgaggtctcagcctgctgctgctcactctgtgggtttcacagacgtggaacagcatggatcccccatgacagccccacacggagttgcttccccaccctaaacagcccctatgctcctcccattcacccctcccctccccaacccctggcagctgctgacggttttactgtctctgcagttgtgccttttccaggctgtcctgtcgttggactcagacagcaggcagccttcccagattggactctcacttagcaacatgcatttaagatccttccatgtcttttcatggattagtggtccagttctttttagtgttgaataatatcccagtttctgatgtaccacagtttatccattcacctactgaagggcatcttggttgctttcaagttttggcagttataaaagctgctgtcaacatctgtgtgcagatttccgcatggaagtaaacttcagctcctgagtaaatgtccaggactgtggttgctcctgtggtcggagtgcttagttccatgggaaaccgccttccacagcagctgccccacttttcccagccacaagtgagggtcctgatgccccacacgcccaccagcacgcggcggtgtcgcagttccagttttggccaggctgctgggtgcgcagtggcgcctcgccctacgacataagacacggaccatctttccacatgtggatttgccatctgtgtctcttctttgttggggtatctgtccaaggtctttggtccattttttcatcaggtggttcattttcttattattgggttttgagagttccttgcatggtttggataacagcctttatcagatgagccttttgtagatacgttctccccgtctgcgtggcccacaagctcgtttctacctgacgcaaaggaccctggagtgaggatacagggactctgcatgaccaacacgctcgtttctacctgagcaaaggaccctggagtgagggaactgtgtgtgaccaacacgttcatttctacctgacactaaggacgctggagtgaggatgcacggactctgtgtgacacatacactcatttctacctgaggagtgaggatgcagggactctacgtgacccacgcgctcatttccacctgatgcaaaggaccctggagtgaggatgcagggactctgtgtcacccacacactcgtttctaccttacacaaatgaccctggagtgaagatgcagggactctgacccacaagctcgtttccacctgatgcaaaggaccctggagtaaggatgcagggactgtgtatgacccacacactcgtttccacctgagcaaaggaccctggagtgaggatgcagggactctgtgtgacccacacactcgtttctaccggatgcaaaggaccctggagtgacgatgcagggactctgtgtcacccacacactcgtttctaccggatgcaaaggaccctggagtgaagatgcaggggctctgtgtcacccacacactcgtttctactggatgcaaaggaccctggagtgaggatgcagggactctgtgtcacccacacactcgtttctacctgagcaaaggaccctggagtgaggatgcagggactctgcatgacccacacgctcgtttccacatgacacaaaggaccctggagtgaggatgcagggactctgtgtgacccgcacactcgtttctaccggatgcaaaggaccctggagtgacgatgcagggactctgtgtcacccacacactcgtttctactggatgcaaaggaccctggagtgaagatgcagggactctgtgtgaccaacacgcccgtttccacctgacgcaaaggaccctggagcgaggatgcagggactgctctgagttaccagcacacttgtcgcttttacacataaagaaccctgtgactctgtcccaggaccttttagcctagacctaaaaattcgcagcccaggaaacccaaagcattttaggaacctgaggggtgggccaaggggatctcagagtttgatgctggctgtggggtcagcaaagggtggctggggcttcccataagcactcccaggaggccgtgcaatggcccgaggctggttccacctcccgccctcagttctcacgcccagccgtgactggagcaccccttcaggaaggagtccctggctccaggccctaacgtccatgtcaaggcccctagtggggcagcttctaccccagggaggctggaactggaggcagcctggagctccaggcaatcctggcaaccacctgcttcttgaagtggctgcagaaaaacccctgcttccaaaccctggtacagactgtgtgaggcctggaacgcgggaggcacacttcacagggtccctgctcagatgcaaaaagcaaggctaacagcaggaaaattatttaattaccttcatggtcatcaagtaaaatcagtcactcagacctatatgtgactggaagtatacacattatagaagtgtatatacatgtaaatatatacatgcttattttcctctacttttatataccttacatatatatgtgtatatgtgcaaatgtataaaacatggacgataaaccatagttgagatttcaaatctcaaagatctcagaagcaaattactatccttaaattctatacaaagacataacatcttacattcttgcaaacaaaacattctctaagtattagcgttttattttaaaaacaaagaatgcattgcactctcgcaatttcttatttcaaatcactttcactgagagattctataacttgctaccttgaatacttccaacaataatagctcattagtttaagcattagggagttcatttttaaataccatcactgattaagaaaaactgctctacaggactttcgctattttaaagcgtaatgatgtccacctctctatactcaagaacaggaagatgcccgtgcagatgtttccaaagcaattcagaggagatggtctagacacacagtttaagacaatcacaatttcaaaaaaaaaaaaaaaagaatcacattttcaaggtcagaagatcaagaccaaatccaggatattctgaagggttcaacttacatttaaattatctcatgtatttgtagtttggatggaacatgacatccttaaagacaaccaaatctaaaatacagaaaagcattcttaaatgcatcacagcccttaaaacccacagcatatctcttttgtttaaatgtacttaattttatcacattttcattttataatttcaaaatttctaaagctcctaacgcctcaaaccgagatagaatttgacttcagcaatttccaagtcacaagcaggttgtatgtccacagctattcggaatgtggtttctgatagaagcttttatgaacacacatgaaatccctctggattgcaaaggctgagactcagcgtatctcagaatgaaaatacatacatttgtgatggacagcagaacacagtacagatactaattagtaaaacaacagcaaagtctacggcacttctcatacagaacaaatacaaagtgtttgaggaaaagtctttctaactgtaaaaattcgagctgattggaacaaagaagattctgaatatgatcttggctgctttacaagacttcagaattttcctcatctgcaagtgaaaatgaacctcctgcttgcccactgaggacagggagagaacagggtaggataacaggcctttgaatgcttcgtaggtggagaaaggaagacaggccagccccgtacacccatcagcacacccacaccagctgtgcaggtgactcagctaaccctgcgatggccaggcatctcaatgagacagccgggcctgagtgacctgccaagagacatgatggccaagcctggatggaatccctggagggtagtcaacccagggcctctcaggttttgtcccagcaggtctgtgcccaggaatctgcatttccaagtagcccaggtgagctgctgcccagaggccctcaccagtcatggctcacacaggcagtggaacccccgcacaccacctccttctgcaacgcctggcgtggattttccttaattgccgatgctgcgctcctctgtgcctacactcaccatcggtcccaagtttactgaacttagaatgagagaagggaattacaaaggaaagcgtccacctgaaacaggaccgaccggggctcacatcagcagacacagcaaatgcagcacacctgtgcacggctcaccactcacaaagcccacagccgcgtggtttccactctgaacgtccaagtggctgtgggcagggagatgctgcacagctgtttctatgctaaatacttgaaggtgtgaattttattacataaaatttagaaaaatgtgtgtttagcatataaatgtgtgcatttatttatgttaaatacatgaaaacatgtaatccaggtgtttaggttcataccactgtagagactaatttctattcatacagctgcacagctggggcccagaaccaacacccaccagctgtgtcaccgtatccgctgtttttctgtcacacaccagccctaccccaccaaaaaaaaaaaaaaaaatccgtggcatttaataaaaaattcttttatgttagttttacattactagagacgaccttgtggtcctctttgaagagatggcagcacgtgaaggatctcaaatacacatatgttctgggtctcctgatctaaggactcgtccacactggtggctttaactgcgcctatgtggaaacttccggaaggcatttgtgtcatgtctaagagcaaactggcattcatgcctcagcactgtgtgcctcttctttcctccgtcccgccagcaccatcttctcccagggaactggtgccgtgctctgaggctctgtcctgccagtccccggcagagtccctggtgccatcatggataaccagccctccgcctgtccaggtgcatcaggcagcaagcaactcatccaagtctgtttagaaaccacacacttgcgacacctataggcctcagtaggtggaggcggacagggtaagggcagccgtcctgggggacagctgtctgcagtgagccaccacacattcagtgaggctgtctggctcctcacctctacccagcctccacccatcgcatctggcctggattctccgacgcctgcacagccttcacccggttcataactcagctcacaaaggccccgtaccgtgcgaagtgcggcagtgggtgcatctgcagctgtttatcatctctgcatctagctcctctccctcacaaaacagcacctctgaagtcatggcctggcctcccgaccctccccgcttctgggcttcttggcatgttgttctgctccacacacctcagcaaatattgctgattagctaaaatcacccagaaatgccttaaccttgacttcagccgctgcttttgtaatttttaatatttgtacttatggtgtgatttggggaacaacaaattttaaaattagagcaaaaagatgtggtgtttattccctcatttctacttgcaaccttgaaaattcaagtagcagcaagagtttgttgaaagtaacttccaccaaatggaaccgattacaaatgtactacagagtgtcaaataaccagagatgtaaatacagatgcagacacagatataaaatccagtggttacaccagattgagaaatgcttgccagtttgtaggacttctaaaacttgacataaatgttggctaagggatacaagatgttatgagatgagtgagatggttggcctagaaccacaggctctctcctctgtacaacagaaaatccataagaaagtcaaatgtgaaagaaccaggtaccgctgaatggcataatcagccatccttcccgtccctgggccagctgcggtgagtgcagccagttgttcaccaacatccatcgtccatcctccaggccacggctacactttactcccagctccacgtaattatgtagattaggtaaatgatggccactctcaccctaagcctcccccgccagcatggcaatcacccagccccaaccacagcaaggacagtcgtgtccttgggaatgtagggcaggtgtctggaaggaacctggatccctgaatacctcatggagcagtcaccagcctggaacatcccccctgaagggtttgcgagagagaaaacctccttggttcctcaagctacaatactgcagagtccctggtcacagcatccttacctaccctagtcaggagccattcatgcctttcaccaagacataaaaacaaaaacgcagtggcaccgtcacgcacacccagaacatagactgcctgctgcccacccagaatgcagaccgcccacagctcccccagaaagcagaccgcccgctgcccacccagaacgcagaccgcccgcagctcccccagaacgcagaccgcccactgctcccccagaacgcagaccgcccgctgctcccccagaacgcagaccacttgctactcacattcatcttattaacaccaaaaagccatagtggtggatatcccggatgtggacacttagtggctttttgctggagatgcgctttgtgcacttatcacacaaccatcttggactcaggaggcgctgtgcagatggcagctgtgcacgtcacagtgagtctcactcgctggactctctgccgactcccagcatcagcacctgtagggtcctctcctccgggagcacgtgcttggataccacagtatcctgtggatccatacaacggtgcagtgtgccccaggagcttgcaaagtaccactgcatcagtgcttccacaggtgaggccgggggcagaagccaacctcaagcagttaccatcctccgtggggctggcgtccaggcaggaaggcgactcagcagctctcctctcactgtggaacttcctaggtccccacatgaacagaacctaaataacacgcaagaaacaacaggaacgagaacactaccagcagcttctgagatgggcaagctgagctgatcatgagacacctgacggggatggtgccagaacccctcccagtgacctgtgaggacggcgctgccggcatctccctagaacctgcccaagtcgagttagactcgaggctcccaggagtggggcagatccgttcaatcccacaatctgaacattcttctaggccatctcatggcccccatctcatagatgggaactgggacactgcaccatagacccggtcttcctctataccacacaccagtacagtgagcacttatggactgggtattcacgtaaaatactgcttaactaaaacttctgatttagaaaatgtttaattcctactcacagagctgaaagtgctctgtcctagaaggcagcggctgtaattaagcttgagagaggaagaagggatcagagtggtgccaagtatttaaatattcaactaaatctattcaccacgttgccatgctcctgtcacctgcttcgttttccgtccttaaaagacacaaaagttagttctcaaaatagacaacctattttactgttgcttagccataaagtagtgagctatgtatccaaaagggagatatgggaaaacagaaaagacaggagacagatcctaaacaccgtaaaacagaaaacatccacaaacgatcagggtgggagggcagctgcagcagcacctggctccgttgcatctttgtgagccagccacatgggctggatagctcacttagccactgaaattacatcatctaagatttttgttgcagttactttgataaattctcccctcctgctatggaaaggtttagcttgcttttatttttttaggtggagtctcactctgtcacccaggccggagtgcagtattgcgatcatggctcatcgcggccttgactttctggctcaagcaatcctcctgcctcagcctcccaaagaagctgggaccaacaggcaagtttcatttctttgctaacaaattcctaattcgccaccacgtggcgggcccatcaggccatctgcctggacgtccaccttgccgaccggctgtgtggtctctaaggtggatgcactccggttgcccgagctctgcacacgatgccgagtctccacgcctgccgccgtctaagtgactgacagcccggagcatcccggacatgccaccgtgagccgggctttattccacagggcgactttgcttcccgtgaggagatgcagcacgtgagcacagatcaaagggtgtcagcaactaacacatttcccagatattaagcagaggaccaagggttttgttccttatttgctatgggcttgattcaaaacagctttctggactcctggggacaaacatctctaactgatgagaattctggctttattaatggaagaatcacctaatgcccattttgtaactgctgttcttatcagaacttgaggccaaagaaagggaaaaataaaaggggggccaaggtcgtgacaccccagtttgtacaaggccaaccagcctgcttgagggggtgagaggagtagggtttttaaactgctgacttttaaaaacatggctgtaggctggtgcagtggctcaagcctgtaagcccagcactttgggaggctgaggtgggagggttgcttgaggccaggagttcaagattagcctgggcaatacagcaagaccctatctcttaaaaaaaaaaaaaaaaaaaaagactgttactaacatagtaatgaaaaggttgattaatacaataaattactatgtcaacatggcaccccctgctgtcagacgagatggactctctgtggctacaatgaggcccagagagaaatgcaagcggcatcacagggaggaaggttggccccaaagccccacggcactaactcctgtacagtttgttaaccagcatgaagtctcctccacagtcagacagcagcctggtttagaggaacgctgcccacgggaccttggcagactcccgatgccggccgaccagacaccccaccctgggaccctgcaggcagccccgactggacagaagggcgtcgtgagcatcctttcccgccaaaagctgcagaccctgagccagtctcggctgttgacagaggctgcacataaacgtctgcgcccaacagctcatctttggtcgtgacgcgctgagtccacctcatttcaaatgttacgctcgccccaaggtgaacacagatgttacaggttaactcactgcgtgtgtgctgtgactttccccgtaaacattcagacattccacaatcccgatgagcacacacagcgaacaaaccccactttccctgtaaacgttcagacattccacgaacctgatgaacacacacagcgaacaaactcccgtgtgtttaaatgccgcggtctcctcccctcctgaggggcgtgtgcttacagttcccccgagaccacatttcccaaagtagactgttactctgaaaataaaacctttttccttcctctgtacatctcatggtcatgttgttaacaactattgctacaaatgcaaagaatcgaggtatcatacgtgccgttcaccgaattcctaacaccaaaggttcagggccccccagtctgacggaagcgtctatcgccctaaagccaactctggaggtaaaggccgagctcgggaaaggcggtgtcaccggcaaacccacaccatagggccctctacagttgtgtgtaaggaattcttggcctgtcctggggtgtggggaaatcaggatgcaagcagatatcatacgctctgccgcgggaccatgaagtctgtggaacctcagaggaacacggacaaacagctgcctcgacgggtgcccgtgtcaagaacacagacacgctgggaggagcagccaatgcaggcaacgcttgcaactccagcacgcggcagcttccagctccagcacaactaccatattctgtggcaaaatttttaaaataagttttaactagttataactctaactttgttttatagataaacagagaacacagggtaccaaccggctccaaaatacttcgcccagaaccaagtctagaatgcagatggctgctgttccaagtatgacgagtcccctttagtgccataaatcctagaagtgactgagtgctccctcctaaaccagaaagcaccctctgtccccaggccagtccatcagccccggcagaagcttctagagtaagagcctgtggatttgtattgcatggatgtaaacccaccaaagtcacaggggctcatcctggaagcccatccagttacccactcatgtcccggaaagccctgcccccacctccacccccgcagtcatgctgaaccagaactggcttctaaggcccttaagccactccctctctcccctggacagacccttctcaaaccatgaggcccagggtagccttaacaggtggtcccagcaaaactggccgctgcattttcttgctggcaaatgagtcaacatctaccttagagcaaccaaaacagcatgtttttccactgagaagacctcgtttctgtccatttagaattggtattttgtgtgggtgtgtgagagagtatgggtgtgagagagtatgggtgagagagagagtatgggtgtgagagagagtatgggtgtgagagagagtatgggtgtgagagagagtatgggtgtgagagagagtatgggtgtgagagagagtatgggtgtgagagagagtatgggtgtgagagagtatgggtgtgagagagagtatgggtgtgagagagagtatgggtgtgagagagagtatgggtgtgtgagagagtatgggtgtgtgagagagtatgggtgtgtggtggcgggggtccttgttctgtcgctcaggcacagtgcaccacaagtacagaggtgctatcacggttcaactgcagcctcaacctcccaggcttgggtgatcctccagcctcagcctcccgagtagctgggaccgcacgtgcacaccaccactcctacttaattttttgtagcatcagggtctttaggtgctgggattacaggtgtgagccactatgcccagcctggaattgatatttcttaaactattactgagtttcccacataaaccccacttacatagatcccagcacactctcacagctcgagggttttcctgaatctcaattctgtccattcaaggtcagtatctaagaaagtgtcagaactgaccctccctcgacgaagcctaaggtcaaatgcagcagcatctccggtatgaggagagaaagaaagaagggtggaaaacacattgaaattcccgtgttagaatcatcaccaccaacactttacgaggcaatctgctttccagaacatctagctgccggattaacttcacagccaccagattccacaggcaggtgctcagggggacacagctttctcaaggccgcacagcccgggcaccataacagcctcggggcaaactaaacaaaggcttgtttctctcaaggacaaaggtgctcaaatccttccaaatagtttattcttctaaataggttagatggcctcctacaacagtttagagtgccagtgtgttcaggagtgtgaagggaaaacatctcaggaccccaaaattactaagctaaagggaaaaggtagggaacagcttaggcaaacctgcctccccatgctcttcctaacagagatacctaccaaaaaaaaaaaaaagccacgtacctccctcacaactagtccacagggaaatttctcatggacagagaacagaactcaaagtcaccccctgcacacggagataaatgcgtatctgcttagtgacgggcacctactcaaccctcctgaggccgtgtcacagatgtgtcctcaaccctcctgaggccgtcttgaaccgtgggaaaatgaactttctaaatgggctgagaactgtctcagagacacttctggtttacaggaagcattctctcctgcaggtataataatgaaatcacatggaattataaaatgccactttagtaaaggctgaaggaattagggtttgacatgctttaaaaaaaaaaaaagaggaacgttctatttatcaatggaccatgaagcccacgcccccttctgcagtgacgatggtcaactgggacgaggagcccctcctgcggatgcagcagaggccgccccctgaccccacttcccagagtccatgcttctgctgctcaggtaacagcaaccctagcttcacagggctcaggcctccaaacacaactcccacccatgctggagaatcaccccggggacgtgcgaaacggggaggtgcaactctcacttcatccccttaaaggggaaaaggcgccttcccactcctcttcctgctggtggggacagaggcaggagccagatggtcaggagttgggcggcaggagggaagcagcctgggtccctgctagtcacagatggcaaatgccaaccagccccgaccttcatcttatagtgaagaaatccttctctttttgtcaggtccctgttagaaagaagttagcgcacattcctttaaaaaaagatacaacatcggtgttttgctgattgacaatatttcaattatctgggggccttgggtcaaatgacgccaacacaggaaactgaaccctgttattcaggaaactaccttccagccccatctaccctcccaggctgtcatcttacagtgtttgtctgctggatgattattattttttttttttttttgagacggagtctcgctctgtcgcccaggccggactgcggactgcagtggcgcaatctcggctcactgcaagctccgcttcccgggttcacgccattctcctgcctcagcctcccgagtagctgggactacaggcgcctgccaccgcgcccggctaattttttgtatttttagtagagacggggtttcaccttgttagccaggatggtctcgatctcctgacctcatgatccacccgcctcggcctcccaaagtgctgggattacaggcgtgagccaccgcgcccggcctggatgattatttttaacaataggtactcttaagagctcggtgtacacaacagacaagaagtcagcctgggttgaggggaggcaggaactgacccctctctccctgcaggatggtacagaaggaaccttcagcacccgggtttgcaggatgctggatcagagcatctctcacatctcaagtacagccagaccctcctctaccgcagcctgttcaggagaaggtggcacctgccctagagacccacagccctaggcgtgggctgagctggagctgaactttcctcccttggtaagagtcagggccaggggtggggagaggagacaagcagcaggcgagaggggcgctgtggaaactccatgctgtgctaactctcatctgacatgctccggccaaagccacgcttctcggggggcatttcccttcacacatctggaaatcatccacgtctagtactccccacagaacagatccttccccaggaggcagacacttggctgtaatctttggtaatgaggggcatgcctttgtacccattctgtagtgtttcctgttacctattttaccttaagctaaaaatggttcccatttacactctgcagtgacacagcgaaacacacgagattcagtgtgatcccacactcgtcactgctgacctcaagttctttatttgtccatttatattaccatcttttctcaagatgcaatgttacagtctgatcataaaaactgtatgtgggctatggcagtcatacacctgcactcaaatcttttatgtcaaatatgtaaagggagcctataggtttggttcaaagaattattggtgttaactccaggaaatacgacaccttgggtcacatttgctcttgcagtgtactctgagaattaggtcaaaataattattataaacatatacacatacttatatgtatgcaaatgccacattttcaacatttctctcccattgctcccgtaagcttccatcctgaggcacacttcgggtgcaaagagtattttcagatggatggtacgtcagctcccctgggtttccataacaaatgtcccagattgggcagcttcaacaatataaattgattctctcccagtctgggagccagaagtccacaatcaaggtgtgggcagggccgagctcccaccgcaggctccaagtgggatccttgctacctcctccagcatgtgcgctcaggcgtccctcagcttgaaaccacatcacgcccatctctgcctctgccttcacacagcccttttctctgtgtctcaaatttccctttcctctccaaggacaccagccattgggacgtaggacccaccctatatccaggatatctcctgagagcatggtatctatctgcaaagaccctgttccccatagggacatcacagtcccgggggctagagttgtatctatctgcaaagaccctgttccccatagggacgtcacagtcccgggggctagagttgtatctatctgcaaagaccctgttccccatagggacatcacagtcccaggggggccagcgttgtatctatctgcaaagacctgctcccaacagggacaccacagtcctgggggctaggactgggacataagtttgggaggacacaatttaataccaggagccggacagacagtgaatgtgattcagaattcgttcatgggactgactcccagtgctctgtggagggggggccatcctgagaggtgctaagacaaagacagtgagtgctgtttttggaagcctaagctatgactcggttttaactgattaaaccttctttccagcaaacagcttccacgtgaacagaagagtgtgtgggaaatccaaagggaaaaggcagtcatctgaaaccatcttcttgaccccccagttctgtgttctacttgagtatctcaaagttaacacacgccagttctttattctgtttttcccagaacttatcatccctgccgtgacaccaccacccattttgtagtcatagaagatgaacaaaagaaggtgggcatcagtcatgaggctggctgtgtcctgcatctcaccccaggctctcctcactgcaccctgtcaggcagcctgaagggactcacccaggtcccaggtgaagtctgattccctctgtgggggaagaagtgagggtggagtgagtttgacaacctgaccacccagaggcaaggccgtatgaaggagggcgtgggatcttggcccctgtgacaacctcaccacacagaggcaaggccgtatgaaggaggcagtgggatctagagccctgcacagctccccagacctgacctggaccagaatctctgtgatttcggggtaaatgactcaaacagagcaagtgcactctctccactgaaaggattcttatttaaaactgtttctaaaatacccatcgttaactaataaggatcaccctggcgcagactccggttcctttcaattcgcctcttttcttcccacaagtagccctctaatgcccaaggaagctcagacaacacaagtaactacgacctggctccagcatctgccccccacacatttgtccccagggcacccagcatcctgccccccgtccccctcccccgcacacttgtgcccagggcacccaggacacgggtatcacccatgtttcagccaggcttgtgtttcccccattaacatgacaacaggagagggatgagggaagacacgagacacaggctggtaagtcaactctaggtggtgcaaacccattgctctggcaataagcaaagctcttggggtctccctaaatatcgagcagttatctttcgtctgcgaatttttttttttcccccgagaccgagtctcgctctgtagtgcaggctggagtgcagtggcgatctcggctcactgcagcctccacctcccaagttcaggcgattctcctgcctcagcctcccaagcagcctggattacaggcacgcgccaccatgcctggctattttttgtatttttggtagagacagggtttctccatgttggccaatctggtcttgaactcctggcctcaagcgatctgctgcctcggcctcccaaaagtgctgggataacagccacgagccaccgtgcctggctgtgaatgtattttaaatttttaagctttttgtttctagactctgtatcctctgtggataacaaatgcttcccgaggagttttctttgggacagggtcttgctctgtcacccaggctggcatgcagtggcacaatgatagctcacaccagcctaaaactctgggcttcagagatccttccacctcccactcccaagtagctaggactacaggtgtgcaccaccacactcggctagttcttttttgtagagatgggatcttgctatctggttgcctagcctggtctcaaactcctggcctcaaggtatccttcagccttggccttccaaagccctagaactataggcatgaggcatgagccattgtgcccagtctcctgaagattttcatcataaacaggtgccacaatcctggactcttccagtccggaccgtacaggggctagggtgagagagggatggttcagggtctcaacgtggaaatgatggggcctgcctgtgctctcagatctaagtcaatgttgtcagcctctgggtttcagtgttttgggtttttgttgttgttctctagccaaacttaagaacctcacaaataagtctaagaacctcaaattacccaggaagggatataaacattctaaggttcttattgaaaacgtttctttttaacaaaagataactgtacctattaatactatcacaattctaaattatatcaaaaaaattgtaagcactgggtaatatgactttgaaaaatgtgctcactagcaaaaagcagcacataatttaaatgtacatgactactaagaactttttctgtgttcatgaatctgctatatgaacctcagttgtgagttgtctgttcatgtcattccgtgtgttctgtgaatctgctgtatgacctcagttgcgagttgtctgttcacgtcattccatgagttttgtgaatctgttctacgagctcagttgtctgttcacgtcattccgtgcgttttgtgaatctgctatatgacctcagttgcgagttgtctgttcacatcattctgtgggtttactgaattcctatggcatttctcatcaattaagcaaacctttcatagagtgctcatattaatcctttaatctttgctgtattcgattcttaaatatttattttgcttctagagtttgtactctatcctggggttccaggcctgtggattcaaccaactatagatcaagaatatttttttaatgtgtttgtactaagcattcagactttattattcattaaacaatatagtttaacaactattcacatggcaagtacatggtataggtgttatgagcaatcttgacatgactgaaagtctacaggaggatgtgcatatgtcatatgcaaacactatgccattttattccagggacctgagtgcccacagaccttggtatccataggcagtcctgcaacccacccccatgggcactgtggaatggctataatagaaaatatagaggttttaaaaagttatgtactaaatctaatcttttgttaagaaattactgtgtgtcacgtgtattatttggaagtcgttcctggtccagagacttgacatgttcttatctttttgtccactgatctaactagtcattccagtaagtttattgaacacaaatcaattttacaattaaattcttaaaggaatcacactcatactgtaagctgctttggtttttaaagtgaaataacagttttcaaaaacagctatatcatagaataacaggataaagcagacctacaatatgcaaaaacatgggatttcaacgctaaccagtataaaacacattacaaacccctaaatatgaaaatgtttgacaccacagatattccagaaaaaaacaagatgatcaaaaaagccatttgcagaaagccactttccccttcacttttcacatggtttctagaaacttgtgtttggcaataaccatgaatcagaagcagcatccactgcaactactgctactgcaacacagaatattaaagcaaaataaaaaggacacagcatatttcctatttatgagaacaggtagagtgttataaaaatgatgtgcgtgttttaaagtcaacaatgttcaaattctaggtctcccgcagacactagacggtaaccgccaaagcttatgtacttggaaactttcaaggagaccaagttcagagctgtcacaacgcagcaccatcctcacacaattatctcaggtgtgtttgagggcaagtgcccccgtcacagggggaaagctgcccggcccagcacttcctgagatcacacagagcttccaccttcccacatcttcaatagttcctttacactgggaaccagagagcaaaacctaaaacacttcctcaaatctcaagacagtcttgagtcctcttctccttgccccttctctcactgaaaaagcctattctataagcaatctgtagtgcttaccagagctggggtaggaggaaagctagtgtttggtagaccaagtttcaagcttggggagaccaagaatatggcggtgatcgtggcatgacagtgtgaacgcacttaatgccaccaaatcgtacacttaaaaatggtcacagtgctatgtaattttaccacaataaaaagactaactgagaaaagtaatctctaattactgtctgccatttcttgcatcctgtaaggtgcatttgcttttggaaatcctcagagcaatcatgaaagactaataccctgtcatctctgaaacacaggtaaagtctttcaagggttttgattatagtaaagtagctggaaagcaaagcatgcattagacacagcagccgtgataggacaaacacatggtaggaaggtggtggtcgtgctacacgcagatggggaaggatgtggggagccacaacacccgatgctggggagccacaacacccgatgctggggagccacaacacccgatgctggggagccacaacacccgatgctggggagccacaacacccgatgctggggagccacaacacccgatgctggggagccacaacacccgatgcttgggaggcacctgggcaggagctgagaatgtaccaaacacgttctaccacgcaacattcatggaccctgagtccggccaccaccgccgacatccactctggctgaggtgtcctctgtcacagacacacacaccctgccgaggacagtgcacaggttaaatgtcaaagcacagacatgctcaggtccagctgctcagccaaaagcaaaaacacatttcccagacaccacagcttgaccttccacctgaccacacccatctctcctgcaccccacatcgtgaccctccacccgaccacacccgtctctcctggacccccccgagtgaccctccacccccatatctctcctggatcccacagcatgaccctccacactgaccacacccatctctcctcgaccccacagtgtgaccctccacctgaacacccccatctctcctggatcccacagcgtgaccctccacatgaccacacccatctctcctggaccccacagcgtgaccctccacccgaccacacccgtctctcctggaaccccaagagtgaccctccacctgaccacccccatctctcctggatcccacagcatgaccctccacactgaccacacccatctctcctggaccccacagcgtgacccttcacctgaccacacctgtctctcctagaccccacagcatgaccctccacctgactgcaccctgtctagtgcatccctgcacctgtctctcggcccccctcacctcacttcctcaccttctcgtcgggtcaagcaccaacaatccgctgtgtgcctggtgcactgagccttgtcaggggcctctgggccgcgtgccaggacacgcccctggggactcccagtgcacacgttggtctcctgcacacttggctcttctatctgcgggagccggcacccacccctacaactgactgcactctcagaaaagtcccagaagacccctcaccaacccagcaacaccttgaggccacatcccacttgcctgctggctcctgaacctcccccaccctgtgacggctcactccctcctgagctccttctgctccctgcctgcctctgcgagttacctcctgggcgatgccaggtgacggtaacatcaaccaggaggcactgctgagaagcagaaagcatggtgcagtgcccagaacgtcatgtccctcaacagatgctctatgtcttctcctcctctcctggcagagctttgctgtaggaagaaggccattcctccagtgctgctacttccaacactggggaaaacaagcttcagaaaggaacggtgtcaaagaggcaggacccaccagcaggactgccagcggccagacgaccacagccccagcattccccagccactacggccgacagcccaggctccagaaatgcacagcttcaaccttcagagtaaaaaccctcccaagccaactatttcttcaacaatcggattggggaatggagggttctaaccctgcccctctctataccacagatcatcagatcccagttcttatcagattgggaagtggggggttctgaccctgtccctctctataccacaggtcatcagatcccagttcttatcggattggggagtggggggttctgaccttgtccctctctataccacaggtcaccagatcccagttcttatcagattggggagtggggggttctgaccctccccccttctctataccacagatcatcagatcccagttcttacgggattggggagtggggggttctgaccctgcctctctatataccacagatcatcagattctagttcttttctaagcccagcactttgcttctgccacatgcagtcatcctcagcaccaggaaaagtcaaacattgagtgatgacgatgacaccaataccaaaagtcagaaacattgagtgatgatgatgacaccgataccaacacatgcggctctggcagctttggtaactcgctgcacagatacaactggacagcagtgagatccatggacatcaccagtcttcgcaaggatcgtgttcctgaatcttctgcgttaggaataaccgtctcctttgcaagggctgaaccatgcttcccactcgcctgtcctctgccttcaccagctttgtgcgcatttccgggcaagtgtctgtgcaggtgccatcactgatttcagtagcgagaacgtacacagacaccacacagaaatgggtaaccctgttaggagctgtgcagggagatctaactcatcagatgtgccaaattcctgttgccatggaaattaaactgacgttgccgtgaccacatctcttactgcaccactaaagaccatctgggtaagaggaaagtgcttctgcagagcattcagctcacgtttacatgtccgttttccctgaatacggttgttacgtgagatagaaatcagtaagataggctgtaacatatagtatggatcgttgtgtctcctaggctcaaacacatcctttaagatcctcagaaaatgaagtttaactctctggggacatgagttacatagtaacatgttttggatacagtctctttcgcattctaaatatcaacaccaaataagttctttagtttctttttacattgaaaagcatttacaaaccataaaatcccccatattaaagggtacaattcagtctttttagcatattctcaaagctgcacaacaatcaccactagtatttaattctgggactttttcaccacccgcaaaagaaaccttgaatccattaagagtcagcacctgctgcttccttccgccagcccctggcaatcgccagccgacttctgtttctctggatttgcccactctggacgcctgtcgtgagtgggcacatagtgcgtgacctttgacgtgacctttggtgccagcatctttcacgttcaaggtgactggtatcgtacagtgcgtgacctttagcatgacctttggtactgccatctttcacattcaaggtgagtggaatcgcacagtgcgtgacctttggtgtgacctttggtgccggcatctttcccgttcaaggtgagtggaattgcacagtgcttgacctttggtgtgacctttggtgctggcatctttcacattcaaggctcattggagcacatgttcttttgttcctttttacggctgagtgatactccattgtgtgcaaattttctttatccactcatctgttgacagacatctgggctgtttctactcactgttacgaataatgctgctatgaagattcttgcataagatttttttgtaaaaacgttttcagttttcttgggcatatgcctgggagtgaaattgctgggtcgtacagtgattttatgcttaacttttctgaggaactgccagacttttccaaagcaactgtaccattttccttcccctcccactagcaatatatacagattccaattttcccatcttcaccaacatgtcaccgtccagtactggggttttacccatcccagtggttgtgaagtggtatctcacggtggttttcattttcatttctaagatgactaattctgttaaatatctcatgtgctttttaaggcatttatgtatctttctttggagaatgtctattcaaatcctttgtccatttttaaattggattttcttttcattgctgagtaagtttttaaagatattcttgatatcaggcccttattgggataatgtgtcttgttctgtgggttgtgtctttttactttaatagtaacctctgaaatgaacatttttaattttgatactgtcttttccccttcagttgcttgttatgctttagacatctcatctaaggaaccattgcttaattcaacgtaacagtttcacctggattctcccctaagggtgtaatgagctgaactgtgtccccgcaagattcccatgttaaagccacaacccctagaaactcaaaatgtcacagggcctttaacgtgacaatttaggtcccataagatcttaagagtaggccctgatccaacatgactggtgttttccctttttttttttttttttttttttgagtttcactctctctgtccaggctggagtgtagtggcatgacctcagctcactgcaacctccgcctcccaggttcaagcaattctcctgcctcagcctcctgggcagctgggactacaggcacctgccacaacgcccaggtaatttttgtagttttagtagagatgaggtttcactgctgatctgtaactcctgacctcaggtgatccacccacctcggcctcccaaaatgctgggattacaggtgtgagccaccacgcccagccatgactggtgttcttataatagagaatttagacacacagagtcctcagtgctgcacacacataagagaaacccatgaggacacagagaagacgccgtctacacagaatggggtgaggacccggaggatcgaaccctgcctgcaccttgaccccaggcttccagcctccagaacaaaggaaataagatgctgtttaagcctcacagtctgcggtgtctgttacggtacccagcagactgacaaaatgggtctcacagtatcgactcttacactggatccattttgagctatttttttgtgtagggtgagggagggtgcagtccatccttttccatgtggatatccagttgtcccagcaccactaagttgcgaaaggaaaaaagtaaagcaaccccttacaacctttctccatcaacagattagaaggtacactgaagaatcatggacaatttgttgtcggtttaagccggtggttttcaaacttttgggtctcaggaaccctttacagtttattaaagatcacaaaaagctttctcatgaggccgggcatggtgggcttatgcctgtaatcccacccagcactttgggaggccaaggcagatgggtcacttgaagtcaggagttccagaccggcctgaccaacatggtgaaaccccatctctactaaaataataaaaattatccgggcttggtggtgggtgcctgtagtcccagctacctgggaggctgaggcaggagaatcacttgaacccgggaagcagaggttgaagtgagccgaggtcacgccactacactccagcctgggtgacagagcaagactcttaaaaaaaaaaaaaaaaagtaacaaatttattttaaaataataaagtcattacatgttaataaacagcacagtcttaaagaaaaaaccattttccaaaataagcagcagtgtggcaacagtttgtgctgctgtgagaacacctaacgcctctctgcacctcggacagcagggttctcatgcctccatctgcgttcagtgggctgcagaactctggttgaagtttatgaaaaatgtctgatcccatgctatatacagttaggaagaagtatttttcactgtgctttcacatagttttaggtattctctgctgccaaatgtcacaagcggcacttccatgcaggctgtctgcaacgcagagtctggaccctggtcgacgggcctttctgccccaattccttttaagcggactggtctgtcctgcacttgagtggctcttttaccagcacacgattttgtaactggttagaaaacactggttcagagttatgagcagcttccacatttcattatgtcaaaaaaaaaaatcacatcaatatcaccactgatcacatgagaaagtggcagacacaagatttgtatattttaatattcactggaaagctccaatggctatcattgggaataacgtaaggtattttccttgagatgaaagaatcaatttgttcatttttcaggccacacctgcaaatacctatctcttaagtggcagagtttgtaagtcattctttagataaagaaggccattagtggaagaagcggttctgcaggttcatgggagagcacttggtgcctctgagctaagataaccatcaaatcctcggaagacgcacctctgcatacttcctgtttctcattcagaacattccagagggaacccggaatcccggtgctgcagcgggactgaagtttgctctcacccacacaataaacccagggagctcccccagcccccatcgcgaggccacagccttggtcctctgatccaggagggctcctgcagctccagcctacagggagaagcatgcacccacacatcagaaagccctcccaggcccagcgagcacttctgcttatgtgccagccaagtgtgtgtaacagggccacagccagctgtgaggcaggcagtgaggtacccagcaaatactcagggctcacatcactgagaaggaaggaaggttgacagcgaagtacccagcaaatactcaggcctcatgttacagaggaggaaagcaggcagacagtgaggtacccagcagggttcacattatccaggaggaagggagggtggagaaaaaggggctggaacagtctctgtcatgagctttagcatttacaaggcttgctgaagattatccgatttgatcttcacaatagctcacaagataggcagaggcatgacttttcagagatccagagaactgatgatgaccacgtgcttttcccacaggctcccagaaatcatcctcaaatcatctctcagtttatacatgtgataaaatctcagtcacgtcccctctctgcagggggattttaacgctgccctgctgttccatcgcacccctgccctctcctgcatttcatccatgcccaccatccctggggagcccacaccaccccacccgcagctgctgatggcttgggtcacccttatctctcatttccacctgcagggacctgttctgccttcaaatgcagctcaaacccactcattgtgtgaagcctttttcagccatcacaactgtcacatgtaaaagcagtctgcaatgcttcatttaggaggtgcttgtgttgcctcattggctgtgatcaggaccaaattctgagcaaaccaggtggtgtggtggtcccctgtccccacctctgccccagtgcacctaaaacaaggattcctggaagcaccttttcagtccaattcacacgagtctgccccacccccccccccacaggaaagccctggtggtcagggctcagggcccccaggtgggtaaggagagcttggtgccctctctggagttgtcgcccagagacctacggctggaagggaagaaacttgcatcctgtgaaacatccagccccgagacccactcaggagcagaagacgggaaaagagcatcgaacagcccctcgggagggcagtcagcaggagccgcggaggccaccgggatggagggagggagggagggagggaggcaggcaggcaggcagtgaggccagaggtgatgtggccaggagggagggagggaggcaggcaggcaggcaggcaggcagcgaggacagaggtgatgtggccgggagggaggtgatgtggccagaggtgacgtggcaagggttatgggggtgacatggtgtggtggggggaggagatgtggccagaggtgatgtggccgggggaggagacatggctggagggaagcgacaagaggggtctccaggcctcagactgtggagctttcacgctcgcacaacctcacagactgtgcctgatttatggatgacattttaattaagatgttacatctaactttaaagaaaagtagttatttagaaccattgtgtatgtttaaagcacggtacaaatatagcacatttcccaaaccaaagaacagtgcattgcaggaaaaaatagcagctcacaaaaaaaaaaaaaaaaaaaaaaaaaaagtgagtaaagaaaaaattcatttaagatcagaaataaagatcctacagctcttctagtccaatcccccaccctaacgtgaatgggggaaaaagccaagtagattctagttagtcagaattaaaggcaaaaccgatccactttactttctacttgacagaaaacaagcagctcatcaaggaatccctacaaatagtagctttaagagtccccaaaatgcaaaattcacgttcaaattcaatcaactgctaagtgcgataaagttactttttcattattgcttccctcatccccaggggcctttttagaccttttttccccaattgcctccaacacccaggaaatttaaaccccacaagtaagctatgtctcaattaacacacagcaccctttggagcagacagtccattgctctaagacgtccttgtcacctaagcaccaagtacagcctgagaagatacaacgcgtccacacacggactcgggcccatccacaagccaacaggtgagatgtggcacatgagaaggaagacgagaccaatgagcttcaccaacaccccaaaaccacgcagaagtgacccatacagcctgcttgggcgccagtgactcctgggaaacagccaagggcggcatttggagaagcagcaccacaggccaggagggtctggtggcttcagaggggaggggtgcccccgaccaggtgccgggggcttcagagcggagggccccccccgaccaggtgctggaggcagcgggacaagccatgggtgccctcgtcacttttcactccctactcccgattcttgccctgaaagctcgcagcaagtccaggtatttatttacccataaaattaagtatctgtgagtaacactagtcactaattcacatagatctgagtccacagatacctctagagacaccaccatcccttctggtagaagggcagcccaggggcccacactgctaggaagggagactgtgtctccagcctgacaatgcagagtccccaacacaaggtctaccttctggaaccatgcggtgtcctacagaagcaacaagggacgtgtagcttttttttttttttttttctcttaagacagtctccctctgtcgcccaggctggagtgcagtatcacaatctcagcttgctgcaatctctgcctctcgggttcaagtaattctcctgccttggcatcctgagtagctgggattacaggtgcctgtcaccatgcccagctaatttttgtacttttagtagagacaggatttcaccatgttggccaggctggtctcgaactcctgacctcacgtgatccacccgccttgacctcccaaactgctgggaatacaggtatgagccacagtgcccggcccatgtagctatttaaatttgtctaaaattaaataaaattagaagtatcagtttctcatttgcacttcaagcattcaattacccacaggtggccactgaccacagaggctggtagagagacgctgcagttccacaccgcagaaggatctatggacaaagtggctctaagatcatctcggcatctttatattgaagctactgaagttttactctgtttactatagatatcaacattctcccatttaaaaatgtcagtgctattacaacaatcagatctgtgacctcccagaagctcttctcctcctggacaaataaccgcagagcgtctgcactctgccttcacactaagggatggcagaagcctcctgtaaaatcaggtggagaaaaaaaaatgaatccctagcccctctccccctacgattttgtgaaactcctcttaatattcagaataattgccagagttgcaataaacaagcatcccttgaccaggaagcaacagggaagcaagaagagggatgctccattccctctgggaccccaggcctggccgggactgagaaggtcagcacagccagtcaggcctgcacacccgatgcgaaccgtgcacatggcttccccgggcctcggtctcccctctgccctcactggacactgtggctctggtacatacctgatgcgaactgtgcacacggcttccccgggcctcgatttccccctctgccctcactggacactgtggctctggtacatacctgatgcaaaccatgcacacggcttccccgggcctcggtcctccctctgccctcactagacactgtggctctggtagaggcagcctctgagctccaacacccacagccagtcccctccttgcaggtctcggctctgctgacactgcctcaagcgcctccctgatgcttctcaacatcgtccacgtaccatgccccctcctccccacagccctggctgccgcccaccccgccatggagcctggcatacagcaggtgcctgagacaccccaaggggcaggcatgccagggtagggcttggagttccaaaggccacgtcccgcttaccacaggtgccacggaggctgtggaaggggtccaggctgcaggtctgcactcggcttctcctggcccccgaggccaataacctagcaagggaaagcagctggaagcaggatcccaaaagcccttcctggctcaagaggaaggaggcctcggtgcacaaacccacaagtgccttccctcctgccaggctggctgtgtcacagcagcatgtccatcttccctgggctcagagaaaggtgagggactcagccccgagtgtgaacagtcaagctcccactagctgtgcagacaatctccctagccctggcttgggaagggtccaagagcaaacacagccatcttgcccacacaggtacagaattcagccagctctctcaatggagttgtgacaggtcaactccaggctcctcagagccaggctctggggttcaacctcgggccactgcacctttgaaatgcggctgtggactcccctaggccgctcaatgtcacggcccatttcgttcagatgctgcaggcccctgccgtggtgtcacacccaggacacccctgccagcatcctctgagacgctgctatagctgttgtgatctgagaacagccacatgcaggcatcaaagggagggcttctcaagtctcttctgagagtggtggctacagcttcggaagacgttgcactgaatcctgggtgagccagactcagtctgcaatctaagctgggttgctggagagacacactctgttgtaactgacggaggctgtcgatggcagctctaccaagaccaagaatggcaactaatctgagatttactatccatactttctacctgatgtttaaaaggaaagcatcgtgaagttccagtagcaagacattttctataatctatcatatcaagatacagcagagatgtagctaaaatgttaatagggtctatgcagaggaacagatcggtctatttcaggaacggtgcttgctggctttttagaaacagagtgaagtccctgccaagtaaaaggttgtttatacttttgctttggaaacagagagggaaatttcttccttattattcgaatacattaactatatttaagtgttctcatagactaagtattaaatattcaaaaataagtaattctgttcagtctatttcattcctcaaatgtagctttcaaaaagtgacaaacacctggccgggtgcagtggttcacgcctgtaatcccagcactttgggaggccgaggcgggcggatcacgaggtcaggagatctagaccatcctggctaacacggtgaaaccccgtctctagtaaaaatacaaaaaattagccaggtgtggtggtggcacctgtaattccagctactcgggaggctgaggcaggagaacagtgtgaaccggggaggcggagcttgcactgagccaaaatcatgtcactgcactccagcctgggcgccagagcaagactccatctcaaaaaaaagtgacgaacaccccatgtctgccctggctcccgccatctccacggagtggacagagcttgggaaaagctcattgtggaggcccagaaggccgagcctttgctcagcagatgagggaggggatcagccaccctagggaagaagccagtatttcctattttactgaggatatccacataaatttctattttgcctcccacacagacctgggatccatgtttcaccaagaggctcgtgccaacagaccctccatgccactgttttcctgacctccctaagaagagccaggccaggcagcatccccacatgggcactggggcccaggaagagctgggtcctgcccctcttctccctcgtccctgcacctggcttgctgtgcaagcccagcagtgctggctgaattcatgttcacctggggcattcagaaaaagcctctgcagaaatcagctgggaagcagggctgcgtgtgtggcgcctggtcactcaagaaggatttgcagaattgagttttcaacacaggtgccgccactaagtccctcaagcccttcgtgagcctagagccacagagccatttgctgcactcccacaatctctaaccaccctgcacagaagcccagtttatccaaaggaccataaaattttgcgtgtaaacacttgaagtttggcataatgaactgaaagttaagtcaccacttctattttccattaacccaatcattcaaacaagtatctcttgagtatgtgcattgaatactgtggaattaggatttagtccatgccttcaagaaacatacatcatagaagaaaaggtatatagcttgtaactttaagagtggcgaacaagcaagaaatatacatcataggagaaaaggtatagcttgtaactgtaacagcggcaaacaggcaagaaatatacctcataggagaaaaggtataccgcttgtaactgtaagagtggcgaacaggcaagaaatatacctcataggaaaaaacgtatacgcttgtaactaacagtgaacaggcaagaaatatacctcatagaaaaaaggtatacgcttgtaactgtaacagtggtgaacaggcaagaaatgatacctcatagaaaaaacgtatacgcttgtaactgtaagagtggcgaacaggcaagaaatatacctcataggaaaaaacgtacagcttgtaactgtaagagtggcgaacaggcaagaaatatacatcataggagaaaaggtatagcttgtaactaacagtggcgaacaggcaggaaatatacatcttaggagaaaaggtacagcttgtaactaagagtggtgaacaagcaagaaatatacatcacaggagaaaaggtatagcttgtaactaacagtggcgaacaggcaggaaatatacatcataggagaaaaagtatatgcttgtaactgtaagagtggtgaacaggacagaatttcacaggctcatcagaagcagccaaggaggaagcagtgattcatttccatctgcagtggataaatgtttcctggagaaagtaaccttttctacagtgatatctgatccttattgtttagatcttgcttgataaggtattaaattaccactttctatgtgctgcttatataaaatacatcactgtcaagggtggttataagttataaaataacttaaatacttcacaaaaccttgggctgtgaatggtgcgaggaagtgggaccatgtgttcccgtgttcttgagacacagaaggggcaagaccccggttcccttctcctccccactgccctgttcccagatgaggggcagaggcaaggctgccgtggagtcctagaactggctccagggccaggacaccgcgcacagattctgcaccccatgtgagaaatacagcctggggagcaatcaccgagttgcctggcagtggggagtgagtccttcatcaaaaggcatcaggaaaacttccaggtgctcctgaaacctgggcacagagtcacagcctggcaggaagcaccagtgatgcaggtgtgcccgagacagaggatagacagacacttggaggccagactggcctgcaggagatgaccacttctctctggttcgtcagagacagagtctgggcttcacttttgtatatggagtctcacagtacagaaatatcacaaagggattagacttcatatactgaccccaagtaattttttcatttaaaaaaaatcatgtttatcacaactaattctaattccaacaaagaaaaataagtgtaaaaatgcatgcctataaaatgtaaaccacaatctctttacccatatgagacccaaaatttagtttatgttttcttcagtattattttttttttttcccaagccattactgaggtctctcctcactgccccatgaggaggttcacgggctcttctgggctctttgctgttttattgtttttcagttttaagggcaggatcattttcccacacgtttgcttccttcatcaccaatttttcataaggacaacatcgtgcgtcggaaaacctaataaccgaacttcattaacggtgaaagagtaaggacacgctggctactatgacagagcatcctcagtcgccgaatctccctgggtgaccaggcacacccccaatctccttggaaccccagcatgcgggtatctctgtggctgacaggactggcccaccctgggggaggcatgaaagcaaacagaagagaaggcaggtgactcatatttaggaaactcaggtgatcctgttgagccgtgtctctcagggtatctggggaccagccacgtgaggggaacctcctggcctggcaggtggcagactcctgggacccacctcagatgcgttaatcagagaatctaaaggcaggcaaactatgaaaagaatctatagaggaaggactagctctgctgtaagcccactacacgcaaggtcacgcaggatgccactctcaagccacacggcgtccagtctccgttccacccccacgggaggaacacccatcttcaagtcacagaacacggtcttcagcgaacacccttcctgcatgacctccactgttgcccggccctgcagcagcagccgctgagtaggggaaacaagcctttgctcctgaccctgcccccaacacacctcaaattctcaaggaaatcctgttacagtccagtcgcagcagactccctcacagcacccacctctcccacaatcggatcccaggacagcacccacccacccccccttccatagccggatccccggacagcaaccacccacccccttccacagccggatccgaggacggcacccacccctcccacagccggatcccaggacagcacccacccacccctcccacagccggatcccaggacggcacccacccacccctcccacagccggatcccaggacggcacccacccctcccacagccggatcccaggacggcacccacccaccccctcccacagccggatcccaggacggcacccacccacccctcccacagccggatcccaggcttgtcctgggccccgctgcgcacaccaccatctctgacactcggacctcagagtgtcatcacgcagccacccacaccttcccaagagggggatccacacgccctggcagcggccacctgactctaccaggacattttggaggttcctcagcaaactcaacagccttagactgaacacagctcctccctcacagacccagtcactccaacgtgtcaccatctgctatagacacatgaaacaaacccctttccctccacaatgttgccaccctgcccactggggcctggccctgcatcctgtccacacttccatttcaggatattctgctggaatcaacagccccagactcacccccaacacctaccacattgaaaacaacgttttttcttgatgcatcaagcgaaagacagaaaaccaccctaaacaagtgtgtgccttgagtcacagagaggaacatgctgtgagccccgaccctggaagggatctgtgcacctgagtccttcgtagccctgtcctgaccttcacagcccatcaaacctacatgcactctctcctctctctctccagctcacagccagattctgccattttcctcagctttaagacaacagccagggcttctcagatggcccaggagccagccctcgatggtcccacacggctgtgtgctccctcctgcagagctcaaagctggtcagtgtggcccacgggacacggccaggagaccggccaccttgacactgggcgtaagaccagcactcctatgtctctgcagaaaggagcagccctgggcagggatgtgcctggcagccccacagagggaccggtgtggaggaccaggcctccgccagcagacacgtcagcacagcatcctggagcagaacctccagcccagctgaacctacagatagccacagccctggacagaatcttcaccgtgactcagggggacagggccagaaccactcagcagagctgccctaaatttgcaacctgtagaagctgtacagtcatacgtgtgtgttgccttaagccactaggttttggagtcacttgtcacacagcaacagacagtggatgcagacaggctcccaggccatgatggcctctgctggcctcacctgggctgtctcatctgttcccacgacatcacgtttctcaaagccaaaggctgccaggacccccttttcttcacaaagtcgttacaagctcacaataccaagtgaaaaacaacaatctgtaaaatgcaacatatgacccaatacagggtggtgagtgcacaggcacatacacatgtgggggtgggggtgggggtgggggtgggggcgggggaggggatgggcagggcaggggaggggaagggggagaggatgggtgggaagggggagggggaggatgggcggggagggggcgggggcaggggcaggcaggcaggcagggggagggggcaggaaggcaggcaggcaggcaggaagggggagggggcaggggcaggcaggcaggcagggggagggggcaggggcaggcggggaagggggcggggaagggggaaaccccagagggcgaaaccctggagggctggaggcaggagggatgctccctggcaacctcacagggtgccgtcacatgacagggcggacacatgacagaattataataaaatgcttaagaagagtaagcaacagcatcttcagattagggtagtgtcctggtttcacgcttgcctcatatgacattctataaattggaaagataacgcattgtcttaccagccacgctgttccccaaatactaactatgataaagactagacagcatctgagtactgagcatgcgtcaagcccagtgaggtaggaatccttactttgctagagaaagaaacaggttctgagagaaccttcctgaggccacacagctgtctccaaacccacctcccgcttcctgaccctgaaccaggatgggaggactcgagtcatgtgtgtgaataatttacctggatgcatctcacggattgagattcgacccccagacctaatcatctctattcagaaatgcgtaaaggaaggtgcagttgtatcaccacgagctgggggaacaaaggcaggcaccctcgatgtagatacggggggtggaggcgggcgcccagcgcagggggacaggagcacgtccagcccagcccagtcacacaaccaccctgccatgccagtgcgggggcccaccatcgcgtctcggggaaaggcagcttctcctgcacaggaatctaagcctgaaagtgtgtttctgagaaggtgtggaccaacatctcggaaatcagacactgtaacatgcttatctatacaggccgcctatgtcagggaatcaccaataattcccatctcgccatcaattatttctggtaaatattgattattttaagttaacagaggcaacacaggaacaaaataatggcaatgtcagtgaatctgctctcccactgaagagctggggctaatgatgaaatagaaggagacttggagaacacagcaggaccccagacaccacggaccacccgacccctcccccaccgacagcccaacccctcccccggcagaccaccccaccccctccacaggtgagttaggtcgtggggccaaggagtggtttccaaggaatctcagaggttttcaaggtcttgcaagtttaacgggagttgaatatttgcatctgagtcacacaagcacattaaaagtaaaatttctcctttccactagaattatgagcttggggcagcagcactggctgtatctcatatgctcatgagaccctttggaggcagctgtacatctcaggtgaatcactttaataatgagagaagtgcttgggccctcgatccgggaccacagaccccacgacgagggtctaaccaggacaagcctcggcctggaacagctggtgtccatgggggcggtggggaacgccgggggaacgccgggggaagccccacacaagctcggtgtgtcctaccccacacacagtcggcatcagccacaggggtcttttgttgtttttgttgaggaaggaacatatttaaaagcccagggcctggactcctcaaagctccccacagacctgggttaatcggcaccttccctcatgttaaaatcaacaactatatatggctgctgacagcacctcagagcagatgcaacactgggctttcttggtgtctggagaaagcaggaattccaggtctctgccttcctacctccccaaaggctctggcccagatgagctcaggttcttccaggtaaggagtacagaccagctacccacatgcccctcagggtcacacagcagctgtgcagactcttgcaccatgcacaagccctcacaacccaccccagaggaggaagcccagccccggagccccatggccccggcctggcaggaggccactgctggggcccctgctcagggttcagcacagcacggtccagccacaccgggtgagacatccacccacctggccattcgtctttaacctaaaacagacacaggaattcagggaggtgttccttccccttgatgaactcattgctccggttctcacctctcccccccactcctgttctcctctccccccgatccagttctcacctctctccccaccccctccggttctcacctctccctcctgccctgtcacagacacccagcactgcgcccaaggcctgactcccagtttcacagggaaaccaagacaatcatgattttagaaactgggagctaggtgtaaaatgagtcaataaagccagtgtccactgatcatccctccacgcacagcagagagcagtcctcgggataaaacccacaggggtggagaagacacgcgatcaaggtggacaggatggaggagtcacaaagaggggaggttcggagaatgaggccatgtgaacacaaagctaaagtgctcagcggctggaagacaaaagctgcacaacacaagagacaagctaaacacaaccatttaaaaaaaaaaagaaaaaagtgtcactgttaagtaggagtccatcaggatttaagttctcgagtcacttaatgtatcagcacacagacttctcataatgcctgaaactcgcggcagtgaacacgtgaatcagttctcccaagtccattgttttgataggcctcttgattctcaggctggtttcaaagtaagctttctgtttgctgataacttaataattaacatacttgaaaacacattgactttcaaattaatctgctaataaaatattaattaccacacgggctatcatccacagaaacaacgtaatcactttctggttgtaaaagcattaaaattctaggcccccctggccatctcaacagcccctactcttggcaagggcattccaaagctaacctgaaaaactagtccaggccatgatcggtggggggtgggacttgccttatcaccccgcctcccttctggaattagacagaacttagactcttagcctgacgggaaacattcacaatctattctcttcaaagctacctggaggcatccctccacatgacaaagccttggtctccacacaaccccttaatcgtacaactctctcaaccaactgtcaatcaggaaatttttgaatctacctatgacctggacacccctgcttccagttgtccccgcgtttccagatcaaaccaatgtacatcttacatttatttgattgatgtctcatgtctccctaaaaggtacaaaaccaggctgtgctctgaccaccttgggaataggttcttagtatctcctgagggctgtatcgtgggccatggtaactcatttggctcacaataaatctctttaaataccttacagagtttgattctctttgctgacatggtacctttcatgtgtatttattttggggcaggttaaaggggactcacaatggattggaggcagcaattgcccactgtacgagaagtctctgcagactgagagccactggcatggggactccaacccctgaagcagcagctctcccatgtcccaaggcctgagagacctgcacctccagggcctctcatttgagagtctcagcaacaacgcaaccaaacgtgatcaacatcacagaatgttcctcaaggcttttggctgttgcttctccccaagtttactcctctaaaaccacaatgggaacagtcggaacaggatggttctcagccactgaccctcctggtaacgcactgtctccaaggccctttcccgccagtcacagcttccttcaagtcaggcttgaaggccacctccccaggaaggaaacctcttcaatccagcaacacaactcctggtcccgtctagagcttgtctgccaggaagggaagactcctcattccagagagagcaggtgccacaaaactcagtgttttcgccattgtgaaggcaaatactcatgaaattaatacactttttcctccttagatactgacaattcctcttctggaggtcagccaaggccatctgcacgagtcacgcgtgacagctctagccccaccttcggtgtcagcagtgcggctccgctgagaccctcctgcaccagccgggccgtgcacctgttcctacaactgctgtcaccagactatagtgattctaaaataatcagcaagcggacgttccgaaggatgcattttaaagaaaaatgtgtaagctttactgcatgaaatcagctacatcttttgctactccaaaggctttttgttttgccttctcaaggttctccacaatgatcctgacagttaaggttcccagttacaggcagagggttgggcaggccgcatctgatgtttaacacacacagaggatccacgtcaaaggattttccctgttcaccaacatcatcaggacaaactttaagcagcaataatttccctgtctggaaaattgagctcacttgagcactaatgcaacaaatgtgtttgacaaagttacaggtggaccttctagtgaatgaatcactatttcaaggaggataatggctcactattcaaaggcatgtttttgtcagtttttataatttcagtctccttcatttgaatcatgaagtgagacttgtacctgatacattacagaatctctacgaaatagacgaaattccaattctgtacattcactctcattcttttccatatgcacacggatggtcgtaatttaagttggcattccaacaggatttctaaattaaaatttctactttaaacattacgtgttaaacattaaacattccattgctaaacatttataacagggtctgcatggccagttttaaagatttcttcctcactgaaaacaagtgttctgttccctcagagagcttttcatatatttaaccaataaatggtctactctaaaatattctagagacagatacatttggagaggacacactcaacacagaaatccataacatcaaacaacagtgcacaaccagcagtgacagtggaagagctgccatgtgagtgcccctaaaaatacacacaagcctggctgcttaaaaggaatgaatatagctaaatactcttctgtgaacattgacgtgtgcaaccttataaagtctactgccttgcagaatcctcctagctgagcagcagtaatcttccttgaaggcttttctcacctacactgcctacaagtgctctctgggcagtattgtgtctttgtttagaatatcacagtatctggaggcctgtaatctgaagtcagggccttatcataaatcagacaccatccccctcagggctagtgggccaacttcgactaatgcagactgttccacagtgccctgcaggcgggcttggtgcatccatacgattttaaggcttggggctgccattttctgcagtcacagatgcagacttacatattcataatgactgaaagcagcacgtatttttatgttccttccgtaatggtggtaataataatggcaatatttccccgatcctttaaaaaacctcctaacagcagttgtattccacccccttccttaaaattagtagaatttaccaaactaggtgaaatgagtcttcatgagaaagtgacaaatcagtattcatgcaatggcatagtagctaggcatacagtgtacgtcaacatcccaaactaagcacccatcacagtatttccaactcgcaggaaagctagaaaaatcagaaggcttaaaatataattatagcagaatttcacaacaatgaaaatgaaaaagaaaccaaagtttctgaggagcatttgttagcaaagcaaggaaagccattaaccagtgctgattacattgcatttgattacagcagccaaagatgcgtccagaggaagagagacttttaaagattattagtctttcggtgagaatggttgcttaacaagttcagactactgggctataccaatagtcaagaacaagttcagactactgggctataccaatagtcaattaagaagcaaggcaaatgagtgtgagtcattttccttagttcttaatgtgtcaaaaatcccaacactgctgaggtcgctcattcagggaatcgatgctgaatttgaagaaactgaagaattaaagtctgtgaataatctgaatggatcaattatttgagagaagatttcaaagctgagaaaacactaattctacagaacctgaagtggaatctgctaagatgtgtcataactaatcaggtaaaaaatatggaacagaaaaagacttaggggagcaaattctcagaccctgtgagaatataaagtgtctgagtccatggtggtcctctcattactcactagcaggccctcgggggagaacgttccccccacccccgcacgtggttgaggcagcagcgtctgggtgaacgtcactggctctcttggacataaccatcctcatctccttgatctctccagcccacagctccatctcctcaaccacagatcaccctccccacaccccagcctggacgtcaccttggggcagcctcactcactccccttctcacccacaggccttcactgcctgacgtccaaagccttaagaaccattgttccacatattttctccagggacaggggcaagtctagtacctgttattccatcttggccagtagctgagggccaagcgcagcagagctaagggtgtccacacagaagctgagcactgtgttctgatcccaggtctgccgctggactctgtggcattttgcctgtctccttttgacctctgtttcctcatctctaacatgaggtaaaagaagttccctccttagcggatttctgtgaggactcaatgagccaatatgcccgaagcattcagcatagcgtccagcagacaccaggcactgcacagaactcagcctactcggccgaacacaccagccacctccacccagtgctcttcccatctcagaaaaaaacacataacacgtgagcagaaactggaaaacaacaaatatgttcccaacctgacttcctagaagactcacacacacagtagaaatctttcttctctgtgtttgtcaatcacctttacaataaatccaagcaaaaccacattagaactcagtgagtttaacatctactggaaacctggtgaagatgaagagtaaacacttttctggtcccctttgctaccagcaatttcccttcctctattcaatggcaaaccaggtgctgtaggagagggcggttccatcactcccctaattggttaggaagctttccatggagcctggaccacccctagtcagtatcagggcctcgagtgagcacaggcaagagaacacgtccattccatcaatagactaagcgtgaatgtcctctctgtacaaagcatcatgctggcatttgtacatacacagcatttaagaaccttaagagtaccgcccttccacaagtttaaattcagctgaggaaaccatgtgactcctaaaaatatgaaacagtacctgcattctaaaaaaaaaaaaaaaaagacctagacaaacacacacaaccccataatgcagagtcaaactttcaaaaccacacatctcacatgcagtgaaactgtcagcaactacagtcagcccagaagatccctttttccatcttagctctttttaaacaaggcatatgatgaacaatcagtttttccaatcgtaagagaggcattttccacagactactaacccaacttcacctagaatttaaaaccatggaattcacacatgctaaaggaataaggatgtaaaatggtgtgtttcccgtttgctacatgtaagcttcatttttaaaggtatatcatcaaatgcacttaaatttcaaactcctgcagttgcccaaaacccaagcataaaaatatgtgcttacagtcgcgtaacggagtcgagcgcagcaaggagactaaagcaggagttaccctctcaggctggcgcccttctccgaggtatgtaacagcctaataactgagtccaagggtggaaggaaaccactgaccagcacttcacacgttgggaagcaggcagggccatgtgggctcccggctttgatttgctgtttcagatccacgtcacccactctcctgctggaggcagcaccttggactcctgcaaaggccggcattcagacactgtcagaaccctgacagagaggggcggattccaaactcaccagaaaaaacaaaacaaaaaaaccacgtatctcaacactgggacatgctctaagaatagaaacttctaaaatcaatgccttattttaggactttagtagtttacattttagagtgtctgaagaaacaattttttgcccctttttaaactgtaatcgtagttaccattaagagtgtctgaagaaacaattttttgcccctttttaaactgtaatcgtagttaccatttattaaaagcctggccaggaatcttaccaacatactttttcacgtgaccctcgcggggtaaccgcaccaggccttcctcagaagcagtgttgctgctgccggttcacctggtgcatgagccgctgacccaccagaggcgccaccaaaccctggagtgttacagttgcctttcctctcgagtagcacaccacaaacagcacagacacaccgcacactgatatttttacagttcagttagactttgacacttacacgttcagatagcaacacagatgctgctgctgaggagacaggtgtcagcaccttttcctgccctctccagaggcgagggcccatgagccccagcacacagaagcccaggctttcttcatagcaacccctggccaagatttcttgggtctctcgccatggaggcggtgttctcaaagacaacaacggtgcctctgagggtcccaagcagggtacagccgtggcccacgactgctcaaagtcaggcccatcggacagacagcctggctcacaggcaccatgcggagcagcgtctatggctgctgtgatgcacagctagcgtgccacagagacatctcatccacagcacgtactgcctctgaaccaaggcttggatgagagaaatcccattccatacaccatcaaatgctgagggagccatctcagaactgatgttccggtggctcaaatctctttgagatgaactgacctattcagaaagggaaaaataattctttgtaattggaaagaagctaaacgttaagactcaacttggttgcacaaaacccagatcagcatcatctgagaatctggaattacacgtatccagggcccatctcagagctgccaaatcaaatccaactccggcggaaggaggacaggcaccggttttggggggttttttgttttgttttgttttttttaagacacaatatcactctgtcgcccagaccagagtgcagtggtgcaatctcagctcactgcaacctctacctcccagattcaagcaattctcctgcttcagcctcctgaatagctgggattacaacaggtgcatgccaccacacccagctaatttttttattcttagtagagatggggttttaccatgttggtcaggctggtctcgaactcctgacctcgtgatccacccacctcagcctcccaaagacaggcatctgttttaacagccacccctgctcccagccacaacacaactgaaagttagcagataattaactgggctgttgattctcttaatcagaaaagacttcctaaatcatctgaatatttctgccaaacaaacattctctcctctgcttacaagccgtgagcaccagtcagcatgacatagaaaagtttggttttgtttttctgtgacagtctcgctgttgtccaggctggaatgcagtggtgtgatctctgctcactgcagcctccgcctcccaggatcaagggatcctcctgcctcagcctccagagtagctgggactataggtgtacaccacctcaccctgctgatttttagttgagacagggtctcaccattttggccaagctggtctcgaactcctgacctccggtgatccacccaccccagctccccaaagcactgggattataggtgtgagcaatcgcgcctggccgagaagtgtttgatagaggctgaggggaggctcccatcccatcccaggacatccacgtcccaccgagcttcccacaccgactacaacactcgaagcatcacagcaagggcagctgcatccccgcagttctctgcactaatgccacagctgcgtgagctgtcacagccctggagctccactcagccttgttgtgttggcacaagcacagcagaaaccaccaagcccccaaaagggaggagtgcggcccagggactgaaccaggaggctccaggggtagcgagttcacacacctcaaacacctctcacatcaatccccgtgcagggaggggatggaagccacacaggacctgcagtgctttctccttgcaaatgaggagtgaagataccgactcatgcgtgaaatcagagctagagttctaccgtggggtgagacgctgttcaacaagtttcatagacccaaatgagagcaaaaagaaacgaatcatccaagatcagtagaaggaaagggatcagaaatttaagcctgtaacaagctttcggaaaaaacttcacttgaggccgggcgcggtggctcacgcctgtaatcccagcactttgggaggccgagacgggcggatcatgaggtcaggagatcgagaccatcctggctgacacggtgaaaccccgtctctactaaaaatacaaaaattagccaggcatggtggcacgcgcctgtagtcccagctactcgggaggctgaggcaggagaatggcgtgaacccgggaggcggagcttgcagtgagtcgagatcgcgccactgcgctccagcctgggcgacagagggaaactccgtctcaaaaaaaaaaaaaaaaaaaaaaaaaaaaaaaaaccttcacttgatctgcaagatggctgtggctctgcctgatcgtttctgcaaatgtctacctgcaatgagccatctcagagccgttcaagagtaacaaaatcaaaaatgccaaggcacgctccgtattttagatggcctgcaacaaggaggaaatgaacagctgtgccagagctttcaaagtttgtttgaagtaaattccagcatgagggcagcggcttcctggctgaaccaatgaagtgggctcctgctcactgcatgggagatcagctttcaggtaaggtgcggtcaagggtctgcaaaccacaatccccgagccttggccagggaaccagaagtgatttttacacttcaaagttttaacaaaagaaaaagaatatgcagagacttccgtggcccacaaggcataacacattgcctaccctgccctttacagaagcttctagctttgctgtcagctacaaagtgtttctataaaataatgtcattgattctcaagcatgccaggaaaagtcacacttttgaacaaccctcaatggagatgcaccatcctgtgtttaacacagatttgagttttgtaaaagccaaaacaagggaggcaattcagctaagtattatagtaatacaatttgagatacataatgatgtgtgacaacagaataacgaattggcattcccgtgagaaaatgaactagctcaaactcaaacgcaaaataacaaaccaaagcatgtgtggcctcttaaagtgatcagtgaaattgggaataacattcggttaaatgatactcatttgttttatattcttttttaaaaaaaagcaaaaacaaaacaaataccactacaccatcactccttaaatttatttaactactgctgcaaaataaaatggagagacttcttactgcagggtaataatcagccatcgtcaccatgaaatagacggctgtgcaggctcaggccctcctacccacaaaggcaggggtagggaggagagaggatggccacaaggacatggcaaccatgacctagtcagcaattctaccctcgcacacctttcctcctgacttaaaattttgaagccatctgggtttaccttcctatgtccataagtcagcaagttctggaagccagaaatctacagtgcttctggcagccaagtcctctcagccttcccccatgttttagggtcctatcagctcacccctggatagtatcaatggcctcagagctccagccaaccttgcactccacagactgaagtatgccaagagccactcaaggctgccactgccacgaccaaaggctttcagagatagtcatagcactgcacaaatccatgtggcttcatcaggcacaaagcagctccagcattccatccagcctgtcattgccaccatagctgtgagtctatgacgtgtcaggaagggaaggaagacactatgtagatcatctcatttaaacttcacagtgtcacaaggtggattttgtcgtgcccattttatggatcaggaaacagttttaaagaggccaagcacagggccctgctgacacaggagcaagccccacaaaggcctgggcatgacccccaaccccacactccctaggtcctgacgtccactcctcccctgtgggagactgatcctgggtctgcatgaattgctaccattcctaagacatgacccacatctctccacctcctcctttaccagtttcccgcagcccagaggcctgcgctcttccatccagccagacatcacacttcagtacctgcacccaacactacttcagccaaaagcttctctcaaacctcccctaccacccgacctgccagtcacacaggtctgcacctatcgcctttctcacacaaattctcacgtattcctgtgtagcaccatccaactgattaaagtctgttgagaggaggaagctttgtagataagtccacaacctactttgctcccagcacactaccttgcatgaggcaaccgattaacagcaaattcatttcagcacaacatttccatttgaagaaacgcagagcatggagctctggtaataattaaaagcgtgtttcattcatcatttgaaattccatgtactgctgcaacagcagcatccccctcctcgccaggctctgctcaacagacgttattcttccagcgcacgactcccaccggagccccggcagcaagagccccgcaggcttcccagcgccctgggctgcggcttccacgctggaccggcactggcctaacgacacgagagtggtgcccccacaattacaggatctgaagctggccgactgctctgtagaatggagacatgtgaggaatccctgacatttccaatgacaggccgctcagctaaaccgggaaaaatccacaaaacagaaagaacccacagggagaagcacttctctctccaacctgacagcaaacagtggctgtgcggacgacctcttcgggataacgtcgaccacatctcaggtcagcaacagccccactgagggccaatcagctccccccggccatcacacttcctaagggtcagccctgccaggccgcctctcctggaaaatcagctgtgacgcacccgcgagggtcgggaaccggctccggggctcatttcccaggctcctgcccactgccctctctcttcctctcctcctgcatcccccctccttcactcccattctccctccccctttcacttcccttctttcctttcctctccctccctcatctcctttcagccctcaccttcctcactgcacttccccatccaactcagctgacacattctcagtcaggtcagtagagggttttctttcactctgtttttattgcaatgattattcttaatgaacagaaacgtgttttggaccatctggatgccacctcatgaccagctgctgccccgtgggctccgtgtccactcagtgtcctcacggcgctggtgcccagcagtatggctgtgaccaggggtagcaacatgggacatgggagaggtatcccagccaagaggccctgcaaagcttccccagcaaaccagagcaaggcccagggcagtagggagagcaccgtgctcataatgtaagcagttcagcttccaaaaactgtccatcaactgcgaattattttgtatccatggttacaaaagaaccataagcattccgaaatatgttcttggtttcatgtttgcgaaatctaagcaacattataataaaaaatcactgaattctgcccgaggctctaggggtgttttcctctctgaaaggagacccttctcgggattgagtgacagccttcgatcacggttatcctagtggtaacaggagactccctcagcctgccgggagctggggccctcgacagcctcatggctccacacgccagtgttctaaggatcacacgtgtgcagacagcacctggcatgtgtgcagcaagctttgctaacacgccccaaacatctcactcatacttgctaaccacatctcttctctcagcctccacagcgtttcacactctgcctttatattgcagttaactgtgcatcctgagcgccacaaaaattcaactccgtccaggcagagggttgcatctttccatcacggggtccccattccagccagcacaggatttgcagagtgggtgagtctaatgttgatgacactctctcaatattcccatcacacccctccaaaaacaaaagagtactgccagcttcttaccgaggttgtaatgagaaaaatagttttctattatttgtcactttttaatgtaatacttgtgaagatgtgactttgtatgtacactgtaagcactcacacggtcaacattctgctctccagtgactgtattcacagatcacaaggacaaaacttctccataatagacaaaaaaaagttttttaaaatgacttccattcatctgaaagtcacagatgcgggttttcctccaaatgatccacaagccagctttaataaacacgttggtgcaggtgagaaaatgacccctcagtctccctcccctcaaagaccagggcagccaggaaactgcactctccagtaaatgacagccggcgggactcgctaaacaggcagccggaagattgccatctcgcagagagagactttcaagactcaagatgtccccgctccctgaatatcctacaaaggacagggctacccaactgcggactgaggcagtaaataaacatgttttcagcaaatagcatcatccacccacgaatgagaggtaccattttcattctcggagggaaatgctacaaagcacgtacattttagcatgtaagtgaattatttgggagttcctgtgtctgctgtcataatgcagcatgtcacctcaaaaggcaaagttctataactcacatccaaggaagggaaaatcatgccaagttttagcaatccagtaacaacctgatgatcaagagaagcctacttgttccagactctaagcagcaatatattgctacaatgtaatgaaaaaacagggatgattaagaaaatttcaatgctaataaaagacaaacataactggatttattctactctagtttacacagagcgcagccgggcagttcacccacatgttattatcgttgctgtttttcggacagggtcgccctctgtcaacaaggcttgacggcaggggcgccatctccactcactgcaagctccgcctcccaggctcaagcgattctcttacttcagcctctagagtagctgggactacaggtgtgcaaccctcacacccagctaatttttgtgttctcagtagagatggggtttcaccaggttgcccaggctggtctcaagctcccaggctcaagcaatccgcccgcctcggcctcccaaagtgctgggattacaggcatgagccatcacgccggctttttttttcctcttttctttttaagtgattatgtgcttcagagtcttgtaggtacttaaaaaaaaagaacaagtaattgtgtaagagaaagaaaccattaacacgttttacacatctcaaaactcacaaatgaaatgccaagaataaaatgtattttattcacagaagcagcattcttcaagttctataaagtggtaccatggacacaccaccacatcacagactagagcgtgacaggactgctcagattccaaacacgttctgaacggtcctccctgtcactttcctcaacgggaacactttattctgtcttctactcaaattaagtatcttgcaagggagttgaagaaaactgcatagcagattttaaaacttcaatgcttttctcaatttttgccacgttctgatgcattttactgactacacggccagtaagtttaaagctttttgcatcgataaagacattgctgcttttagcaataggctttttctcttatatacaaacatctataacttaagctaggaaattgggcatttcacaaagattttgcacaattcctagcagattttagcaaaataaaacccactgttatctttccgcaattaaataaccaaggataggaaactgcacggttagaataaccattccattattttacataaatacaaatgataaagtagaatatgctttggaaagcaatatttcaacatgctaacgatgaagcagaagacaattcctcagcagacagcctcatatgacgtgtgacaacggaaggactctggcccaagcccagctaaatggaaacagggtacatgtattagtgatcgtggtggggcaccctgatagccacagtccaggaaagaacaggtaacatctttcttcttcatgggaaaaccgaaacatactcaagagaccctgattctttgaaacacaatctgccccagcactaaccttcagctcccattgataaagtttgccataaccacagaggtgtttatccaggccctcgaaaatcaaggccatggtacataatatttccaaacactcaatgctgccactatcttcaatgtgctatgatactagaggtcttgtgcaggaccagaagcatcgcaacgcggtttcctgttctggtgttcaatgctttgtatgtgcaaagcctgctgttacaatttactgggtttaatgtgattcggtttgtcacagaagagagctatgaagtttatgtaattccacagattctcaggttcaccttccacgagtgactgctctgcccacgagacagcagagggaagacccacgaaaggcctaggagatgccaggcgctcacaaactggtatcaatcagtctgctggtcttggcttcaaggaaaatagacagaaggaactaaaggctcactacagctaatatcacaacgttctcaactttaccttcgccaaaaacagcggaaaagcaaaactactccagggcatgattccatgctaatctgaaacatggaattattaatacttagaagacaaagtttattgtgagtacaattaatctacacataaaacactggtatcgcaaaatccagtctttgtgattgcttttataaaaagtaaaattctcatttgaggatcatatacattaactgaagttttcaaatgaagggactggtaaacttcagggcatatgatttctgccatacacgaggggagcagtgagagaaaggagctgggatcaagtgtgctgaggccgtcctaggactgaaactcagcttctgccaaaacaaacgcaaaagtctctcaacttcgacagcgagctctgctgagagtgtcaagatgttgaagtcgcaaaggggcttctccctgctatgggcacgtgtgatccttgcaaaaacatagctcagcatcatcaaaacccagaaaagaacacaagccttccagacatgacatccaagagcagaagggagcagagtccaagcttgctcagcagaactgttcctggaggagaacagcacagaggaagtcatagggagggcagggcaagctacagcagcctccatctcgccgcaagcagggccagagccaggggcacagtttcctcccacccaactaggaagcgcaaggagccaaagaagagtcaatttagggtcattttcagaaacgtgcaacaatgagaaacaatctggtcttacctgcgcctctcctccatggtaacagctgagctcgcactttcaggatttcagtggttttgtgtctgtcacatcccccacctccttgcagatgctactcctgcacgtgggtgccagtctctgtcctgctcctgaggccacacctgttgccatccagcacagtgaccaggaactcacctttgtccgggagaagcaaatgcagagttcacacgctcctgtacgggtttgctgaccaagaatctaactacgctgtcggattccagatgtgctggcaccaagcagaatgtcacatgtccagcatttataaatggtatcagtggggttctcctgggactcccaggcagctgcagaaggaagggagctgtcgcccagttatcccaagccaaagcaacactgcgaggcaaacgccacagaccacatcacactcgagcactcactgactcttgacaattactcatacgtgtgttgaaaggcaatgttaagaagcgttcagggtacaggagtcagacaggcctggtctcagccatgggacagcagtaactgcccacaagtcccgtatctaagccctgacttgcccatccggcattccttcagaaacaatgcccacctcacagtgctgccatgagcgctaaattagcatgtacatacacaaccacattcatttcaattgtgctttctactccaatttaatacaaccaggtgctatcattgagactgaataaccaatattaaaacagaagatcaggccagggatggtggctcagacctataatcccagcactttaggaaggtgaggtgggtgatcacttgagatcaggagttggagaccagcctggccaacatggcaaaaccccatctcgactaaaaataaaaaattagccaggcatggtggcacgcgcctgtaaccccagctacttgggaagctgaagcataagaatctcttgaacctgggaggtggaggaggttgtagtgaaccaagatcgtactgttgtgctccacccttccagcctgggtgacagagcaagattctgtctaataaaaaaaaaaataagagggcaagatgaaaactaattgccaaggtccacattccatttacttaaaatataaaattcattagctggtagttgatccagttttttcttacttcgttacaatcttgtatatctttctaacactgctcagcatgtttacatttgaacacacctcaagtgtgactaacaacaaaaaataaagcgcagatattccataaatgagtaagttccagtatggctgcatcctactgcaattaatcctttgacaaggtaaaactgagccatcctgacatagcactgacacatggtacaagaagaatgacctccagttaagtcactggatttagagaacatgtaaatacagtttatcactaattcactagcgattagcaaaaatttagaggaagaagaagtatcggtactgtaactagaaataaaggcaaaaataagcatgagaaattagtcacgtttaagtcagtaccctttctatgtggccgtaacagtttgcacacctgttgtgtgtactttctcatgctaagccgtcaccaagctctctatgaaggtggtaagagcttcgcgagtcgcagagcctcgtattcctatttaaaccttcaagagccaacaccacactcagcacgcagtgagaactctgaatgctcagaggaacgcatgatgggatgaagggccccagccctgccatcagcctgctgcttatttaaagtataaaacaaagccctgccttcaaggtgctcagatctaactaatacaaggttttgcttttaacaagctaaataactagtaatgatgaagactctgaacacctgggagaaatgtaaggcaacctagtaagaggaacttggctgagactaaacccagagatgttttgttttgtttcttttgtttttttgtgtttttttttttttaaccacaaaagaagaaagaacttaagaaccttttggaaagttgggagcaatttctatttctccatggtagaacctggaatttacctttgagacagactgtccttctgttctgaaaaatcagattattcttgcaatcctccatcaagggtgaaattcccaaaggtgtggaaaactaagtactaattttaaaaatccaaataactacaatcttagatttgagattattctcaaattccacatttggaaatgttttgcacaaagtccttattttccctgtttactcgaaagctctctattcttcttttatcctaaatatcttctttctcatccttccaaacagtacctgaagatgaacttacatatcattttcaacgttaacaaagaagatactgcatttgtcatgaactgtttatattcacaacactaggagggattttgctacatcatgaagaacacaaggcagtaaatactccacgaataaagaacagtagaaaatgaacacgtttcctgatgagtggcgacttctcatttattgagctgagggctgacaaagttgtgatatggaaagctagacagctgctatattagttctacctcactgaaatcaccaagtccctgttgtttcgtttctctcatctggggatgaaacacacctcacagagctgtttatgatgtcaggaacacacacatcaaggaagtgattggttcctaaatcattgcaaagcatctactaacctgccaaatttcactagcttgtaatgaacaactgttttcatcctatactctccggtgctaacgagatggtgtgttccgggatccctgcaggggccctattcctgttgccatagagcacacacacatctagatccacatactatatgtacataggtacagtgtaacatgtgtacatgcatagtgtacacacatccaactacatatagtgtacaagcataagtgcactataacatgtgtgcatgcatagagagcacacacatccagatccatatagtgtacgtacataggtacactaacacacatgtacgtgcatagagcatacacacatccagatccacagtgtgtgcacataggcacactgtaacatgtgtacgtgcatagagcattcacacatccagatccatgtagtgtacatatgtaggtacactataacgtgtatgtggtagagcgtacatacatccagacccagtgtacaaacataagtgcacaacatgtgtatgtgcatagagcatacacacatgcagatccatgtagtgtaggtacataggtacactaacatgtgtacatgcgtagagcatacacccagatacagtgtacaaacctaagtgcactataacatgtacatgcatagagcatacacacatccagatccatttagtgtacgtacataggtacactaacatgtgtacatgcatacagcatacacacatccagattcatgtagtgtacacacataggtacactataatacgtgtgtacatgcatagtgtacacacacccaaatgtagtgtacaaacaagttcactatgtgtgtacagtgtacacacatccagatccatatagcgtatgtacataggtacactataacacatgtgtacatgcatagagcgtacacacatacagatccagtgtacaaacataagtgcactatgtgtgtacatgcagagagcatacacacatccagatccataaagtgtacatacataggtacactataacacatgcgtacatgcatagagcatacacatccaaatagtgtacaaacatgtgcactgtaacatgtacatgcatagagcaaacatccagatccatagtgtatgtacgtaagtgcagtataacatgtatgtacacatagtgtacacacatccatatcaatacagcatacataggtacactataatgtatgtacatgcagagcatacacatccatatccatatagcatatgtacataggtacactataatgtgtacatgcatagcatgtacacacatctgtacagtgtacatgcatatgtacactataacacatgtacatgcatctagcacacaatctatatgcatacaatgtacatataggtacactataacatgtatgtacatgaataaagcacagccatagccaatgtacatatacaggtacactataacatgtatgtacatgaatagcatgtacacgcatctctatccagtgtacacaggtatactataacctgtatgtacatgcatatagcatacacatgcacatttgtatgtacataggtataacatctatatacatgcatatagtgtacacatatccgatgtacagtgcactacagcatgcctacacatgcgtagtgtatacatatgcacatatatataatgtatatatgtcagtacactaacatatacatgtgtaaagtatgtacatatgcagtacatagtgtatgtacatatgcagcatgcgtacattagtgtgcacatatccacaagtttattcagtgtgcgtagtgtacatgcatgcttacagtgtgcacacatgtatatatataagtacacaaatgtgcaaatacccatatggtgtatgtacacaggtacatatatggcgttaaatacatgcatgtatgtacacatatgcagtacagatacatgtccaaatagtgtggatataatagtgcccatagttatgcacatatgtacacatgtacatgcatgcccatagcatgcacacatgtaggacacatgtagtgtacatacctatacattgtaaatacatgtacaatggcaatacatagtacgcatacaccacatacaagtacacatttgtatagtacacatataccgagacccagaacaggccatgaatattaacgctgcagaaaggcttccagttccacataatttttttttccaaactgtaatagaagtcatacaaagagggttttaaggaaataattttcatgaataaagctagtgacaaaaacacagtgagaagggcgcaaccactttctgtcagagctctggcttgactgtggagttcagaggtttcctaacatagtacacgtcaggactgactcacgatgaagcactccttaaaaaattagaagtgtgtcctcatgttttggcgtttgagacaaagcctcttatttaatcgagttctgacaatttgactcacagtattctggcagattattcattttctggtgagagagaccaatgtcccagggtgagggcaacaccaagcccttcagggtcagcttttctaggagcgatgtctggcagaatgcaatccaacaccaaagtaggattccccaccacaaagtggacatcccccacctggccacttagacgctttctgatacttactctagtctacttgtttccctttcttgaattcagctggggaaaaaacaacaaaaacagcccatgtgtttgtatgtctaaaaagttaatacatccacacccaactttctaaatgagagatggcaagtatgatggtcaaacagtggccactgttgacaaaatacaggcagtcttctgcaaatatgagtttctaggaatacaaaagtcaagggaatttacttaacatgttaagctgtcaaaggtgctaatcaaaaatgtacttagaggttttttttaaagttatatttgaagatttttaagttgcaatacttaaaagcctctagaaaaagaaaagatacaagtatctggaagatttatactaaatgattttaatgtatttttggtaaagttaaataaggtcagccttgaagtaatgggttccattaccctctgaggccatggatggaacccaccaccacgagagaatcaaacagcaaggctgcacacacaggatgcaggcagtgagccggggctggctggttgtcaggttctgggtcagttctacccggttctgcccaggccctactggagatgaaaacttgtccttgagaagccttcaatcccccacctttcaaaatctaatcctctccaactgaggtccgagtccaaaaatctactgacatcttagcacatgttaggccagctgtccccagcctttttggcaccagcgatgggtttacgtggacgacaatttttctggggggtggttttggaatgaaaccgttccacctcaggtcaggcattggatcctcataaggagcacctccgagatccctcacgcacagtttacaatagggttccaacgtctatgagaacacagtttacaataggattccagtgtctatgagaatctaatgctgccactgatccaagaggaggcggagctcaggcagtcatgctcactcaccggccacccaccccctgctacaaaaacccggttcctaacagaccgtggactggcaccagtctgcagcccagggctaagccctaccggccagcacccacaccagcccaggtggagacaccactcgtgaccctgctgggcagaaaggaagcctgagggcagctccctgaccaggatgccatgcacccaacccaaatacagaggttctccgtaaaaacccaccgtacacttaacataaaacagagtcacaccggggcaacataacaagaccccatccctgcaacaaagaaaagaaagttagccaggcatgctggtgcgcgcctgaggtcccagctacttgggggactgaggtgggaggatcgcctgagccagggaggtccaggctgcagtgagctgggatcacaccactgcatgccagcctgggtgacagagcaagaccctgtctcagaaaatataaataaactaaaaaccaacagaaactggatgcgtttaggtggaggaaacaccgcagaagactagagaatggtgtgatagcgtttctatcaggaagaaaagcgtgtctccaaaccaagtgttcacgcccttgtgagaccctgtgcttgggaagcaccagcgtggccacgtggccggcctcttcctggtttaaatatagtggaatcagacactgtaatgacacaaaggggctatgacaaaacctggaggttctaattgagaaaattatatacctaagttcctatgatatagtctcaaaacaatagaaggaaggtaccattttcaaataaaatttctgatgtatattcaagtgttacctcttgggaaaatggggaagactaattttctccataaacaaaacacacagcactttgccacacataatacatggcgatttatggcagttgccacatattttcacatgtattaccttttgggcatcttctaggtttgcaagaatcagtgactacttttatcccccacaacacacagagaaatgcatgagcatatctcctccaatggagccttcaccataaatacactcataggaaaaagaacgttgtactccaagtgcatctgcaaacgcagttttcttctgaaaagccaaggggcatgcaaagcaaacacggcatatcactaaagcgcaaaggagaacggagcacctctcttagcagaaagagaattataggatagctagttgggaacatttttttaaaaagtttatatggaatgaattatcccagggagcctgtttggtacctgcattaaaaggcaattcattatcctacataaggtcctttacggaaggttcacagtaacatccctggaaatggcattctcctagtgaactttcaatgttcagatttcagtatcgatataactttgtaagcagtcaggagaggggcggctcagaggctgaaagcacacaggtcagggccctcttgtgtcccacagcctcacctgggcctcgctttctgcactgcccggggctgctcccgagactgtgctgaaaccgatctgtgcacgccaagcagctctcagccagcgctcaacagccggaagcagttctgccacggtcatcctccttgtaataaaataaagaacacccgatgcagaaacaggtattaaatgagttatcaaagccgaaatccacccgatcgctccaaaacaaaaacacaccactgcccaatactgatgtgagccaaaaacatggaagacctgagggcccacactgaccacagccagacgccacttctccaagaaccaagcacgtgcctagagatcgcctgtaatgacgcagaaggagagcagctttgagcagccacaaatgtgaaagagagaggcgcgggggccagggtgctgggtgggtccgtctttgtgacctcactgacctctgtcccttggtgtctgtcctatggaggaggtggcccccaaatccctgcatcccttcagcactgactctgaggctgccctgaagtctccccagggctgagactacttctaaatcctgctaactgcacccccacataactaaaaacaaaacatcaactatgcagacaggaaaagaaaaatatacaccaatactcccctattcaacaggcatttaaaaagtaacaggaaaattgtgatactctttaaacaaccaccagccatcatgtcctgttgaaatgttttagctaatcaggaacatctttaccaagcatctgtgtttttaggaaatcagttgacagattccaaatctcggagcccacgacctgacacccactcacgcgcatcacctctcaatctcggggcccacaacctgacccccactcacgcgcatcacctctcaatctcggggcccgcaacctggcccccactcacgcgcatcacctctcagataatctcggggcccgcgacctggcccccactcacgggcaccacctctctagtctcggggcccgcgacctgacccccactcacgcgcatcacctctcaatctcggggcccgcgacctgacccccactcacgcgcatcacctctcaatctcggggcccgcaacctgacccccactcacgcgcatcacctctcaatctcggggcccgcgacctgacccccactcacgcgcatcacctctcagataatctcggggcccacaacctggcccccactcacgcgtatcacctctcagataatctcggggcccgcgacctgacccccactcacgcgcatcacctctcagataatctcggggcccacaacctgacccccactcatgcgcatcacctctcaatctcagggcccgcgacctgacccccactcacgcgcatcacctctcaatctcggggcccgcgacctgacccccactcacgcgcatcacctctcagataatctcggggcccgcaacctggcccccactcacgcacatcacctctcaatctcagggcccacgacctggcccccactcacgggcatcacctctccagcagaaagagccttggacaccattcaaatggtaaggaacaagggtacttttccctcaacacaaaacaagcttgacctctatgagcccggagaacaccgacgtttgtgtagacactttcccactgacttcgtcagagcaagcgttccccatcccacgccaccctgtttttctctccctgggacaccagcgggcatcgccctcacaagctggaaacagaggaccaagctgacaggaggcctctctccattccctactgaattcgctcagaagacgggtgttcccaaacacacacagccctgagtattccacatagtattacattcagtaaatcgcatttgaatgcctcaagcgcttttaataatcccagagtaattctataaaaccgggaaatccgtctcacctggctccaggatcacggcccaggtgatgtgggcacacacatcctgaagctccaacactcaactgaagcggggcgagtgaaatgatcctgggtataatttacatggacacaggaaggtggctgagcccaaatcccctaaaccaggaacaccggcgtcctgcaggggcctcacctctgtcctttcccagcctctgggaaccaccactctgctctctactgccacaaacgccgctgcaaggtacaaccaggaagatcatcattcaaaactgaggattgtggcagaacaaagctgtcagattttaatcaccaacaacactagttacatgacccaaagatgattaaaacaccaggccattcaagactgaattttatctatacttaaatgcatttaatcaccatattagagggttaaggggggttattcctttgttttgcagcaaatatatccaactgctgtaaaaggaaaaggcaatttggtaatgacgcttcttgcagtgtctcaacgggcctcaaggagacacaggattaaaggcaggactcctgggcagaaacggctcaactctaagggcaggtggagttcctgagcaccaaccaaggcaaagtaaggtccaagaccacaccacacttccctcaaccacgtcttcattccacgtttccttctatttctcacaacttctctgggagagagaattaaattgtgctgagcctctgaaagaaaatggaaacacacatgggaaggccctgcagatgctgagaatggacgcagccatcacagcctgaatgtcctttcagggccatctgacctggctgggatccaagtgcaggaatgcatatcggacacatgaaaccaggattacagccactgaacagcagttttccaccccaccacaagcggccttgctaggggcttcctcagggaccaccaacctcacgccaccacccctcactacttcactaacctacgtcacgccagaggccaccccaggcagaccagccctaagtcccgcttcatggtaaaccctccaggcaaactttctcggcctcctccgggaggctgtgctcggaaggtgccctcatttacttctgtggctctgagacatttaactagagcccaacacatctcttcctgttcacatagtattgagttaacagatttttgtgaggaaactttcactgggaaaaacaccatctcaagagccccaatgaccacaatgaaaatgtttttacctccctttaggtgacatctgcaaggccaggtccagggaacgttctggatctcagatagataatggcttatccactcatggtaagccttggtcttgtttcacaagctatcaaatgctgccccccacattttgtggggaaaaccccacaacaaggtggggaggggcgaccagcatgagttctaaggccagaccacgtgggtccccactgacagcatggggaggggcaaacagtgcagtgtctaaggccagactacccgggtccccactgacagcatggcgaggtgcaaacagtgcagggtctaaggccggaccacctgggtccctgctgacagcgtggcgaggggcaaacagtgcagggtctaaggccggaccacccggatccctgctgatagcgtggcgaggggcaaacagtgcagggtctaaggccggaccacccgggtccctgctgacagtgtggcgaggggcaaacagtgcagggtctaaggccagactacccgggtccctgctgacagcgtggcgaggggcaaacagtgcagggtctaaggctggaccacccagggtcccgctgataccatgacttcaggagtttcctaaaccctctgctctccaagttccgcgtcagtaaaacgcggtgataaccgtggccacctcgtgggatgacgggatcacacacaggaacagcgtcagcacacggattgctgggcacgtgggaggccacactgccataggtcaccccatgtgaaatccaggtcatttaataaaatgaaataaaaataccccaaacctacagtcctataaaggtcattaatcccagctatcctcaagacattgatcaataacaagtcgcttcagccctgaccctcctgaaaccccacatccacaccaggcactgcctcagccctgaccctcctgaaaccccacatccacaccagccactgcctcagccctgaccctgcggaaaccccacatccacaccaggcactgcctcagccctgaccctcctgaaaccccacatccacaccagccactgcctcagccctgaccctgcggaaaccccacatccacaccaggcgctgcctcagccctcaccctcctgaaaccccacatccacaccagccactgcctcagccctgaccctgcggaaaccccacatccacaccaggcactgcctcagccctcaccctcctgaaaccccacatccacaccagccactgcctcagccctgaccctgcggaaaccccacatccacaccaggcactgcctcagccctgaccctgcggaaaccccacatccacaccagccactgcctcagccctgaccctgcggaaaccccacatccacaccaggcactgcctcagccctcaccctcctgaaaccccacatccacaccagccactgcctcagccctgaccctgcggaaaccccacatccacaccaggcactgcctcagccctgaccctgcggaaaccccacatccacaccagccactgcctcagccctgaccctgcggaaaccccacatccacaccagccactgcttcagccctgaccctccggaaaccccacatccacaccagccacaggagggcagggaaggaccaggactgtgtcctgggaacttaaactctggaagctgagtcaaatcagtgctgctcaaatcttgtcatcaactgtcttgttaaattgggagattccatctccgggggtctcaagggaacctgaggctccgcactgggtgaggtgagcactcatgctggaatgagaggtcagggaaagttcaaccgaatctgaggtcgcagctgcctgcggcttgggtccctgccgggaaagtgacaccagggccctatcaggacagtaacagaggtcccggcagaggtcccaggaggcaagtccaagcgcagaggctcgtggacccaaagcttgctccagggccaagaggggctgctgtgctgacagtcgtgaggcaggcagccttcgagctcctccagctgccgtcccgcaggcggggagggtggtgcctgaactgccccacaggctaccccagcctgccaggctggtactctcaccccagccactgacaagagcccccatgttcaacatctggacacagtttttcttgaacatcagcttctgtttctctggggtaaatacccaggagtggggtcaccgggccccacgtttgtgtgagttcagttttgtaagaaactgctgagccgtctgcaccatgctgaaccgcagcatcacacaggagtcccggctgcctctgtcctcaccaccacctggtgctgaagaccttccatcagccgctccagcaggggtgtaaaaaaattcaccgcagctgcaatgcacatctcgctgaaaccagtcgcactgaaggtcatttcagatgctttcaggccaccctccccgtccttctcgatggagcacctgttcaggtctctgcccgcttttaagtcaggtggtttgttctctcagtcatgagctttgggagtcctgtatgcattctggacacaagtcctttgccagctgcatgatttgtagacatcttctccctgtctgcagaaaatgtgtctcttcaattccctaggggtgtcttttatattaaaagtttaattttgatgaagtcttgtctccttgttttcttccctatggatcattggttatcatggctaagagctctaaccctaggtcaagacccaaggtctcgacgatttccatttcttctacaggttttctagtttggcattttacattcagggttatggtccaccttaattttcatacaggaatttctccttgttttcactcttttgcatatggctgtccgataattccagcaccatttgttgaaaagactcaaattccactgacctgcttttgcatctttgggtcttctggactccactctgtcagctaacccgtgtgtccctcctgagcataatttacgacttcagtggatgtctctttgtgaaaaaagtaattctgtctggaagcaaaaaccacactagaaatactctaatgagattcttcctcttgtcaggagagtagaggcactgccctatgcagaggtgaggcctcaaaggctcccaggtgaaaccttaacacacaagggggaaggcaattcatttcaaggtagttaccaagggccacaacatgagaccaatgtagccattaaaactgcaataatttcacaacagaatgaaattcataagaactgctgagaagcgtgtgataagttacataaatcaccgtatcaagattctgacggttgactagaagagaaatacctttcacagtatagttcaaacaggagaaaggtaggagtggtttccacatcacacagggcctgtgggaaatggacactcttcctctaaacgggaggtcccgggagtgacgtgataaaccacagtgagaggcacggaactgtgaaaaccggagtcacggcctgagccccaccactgagcctctgcgtccatgaacgacgaggctcgaatgtcaggccaggggcaaccaaggtagttatcaggggacaagaaaatgagtacatggtgcaaggcaaaggtctgaaatagcacagcaccttcgagtcaagtgggacaaactgactcaaaatacagcttctaaaaaaaccacagcaagctgttccttggctctggaaaggctaaatgactaacgcccacactgagcatcttctcccagaggtgaccctggtgacacaaggcccagttcctgcgaacccacgccgaacctcagtgaggaacttgctggtatcttacggcatatcgacatgttcctttaaaatcaggtgtttcatcaacgatgcaggtgccagctttgactcattcacatttcgattcaacaagataatttgcaccctgaccatgccagatgagagtttactacaatctttaaacagagccagaggccatagtctgctcctacacaacactatatctctacaagttagacgggtttttactttacatatcttcacttacctagtgctagaaagcagattaaaaatagaaggaacccagaaacgctattgaaactcaaatatcttacagccaccattctgatgacctaggcaggtcgtcctaaggtctccaccgcaccagagcctgcgaggtgaaggggccgcctccctccagcaggagtccaggagcagtgactgcaccagcttcatggcgtgagaattcccccctcggtctccgagcctccagtctgtcccccaccaggttcttctgccggtggcaaggcccaagctgggtggcacattggttctgaccatttcccttgtcaagatcaacactgcaaacacacatccaattcatcctgtcactaaaaaatgaaagaagccgccacctccatcacagataacagtcaggtttccattactggttttttttgttttgttttttttagatggagtctctgctctgtcacccagggtggagtggagtggcgtgatctcggctcactgcaacctctgcaccttcccggtacaagtgtttctcctgcctcagcctcccgagtagctgggattacaggtgcccgccaccacgcctggctaatattcatattttcagtagagacagggtttcaccatgttggccaggctggtctcaaactcctgacctcaggtgatccacctgcctcggcctctcaaagtgccgggattacaggtgtgagccaccatgccctgccattactggtgtaatttctaagccactctctcacacccactcccctattttgttaaaaaccagttatatggctatattttttccaagagaaccagttacccatttgaagtacaaataaaacatcatgtttaaaaaccaaaaatgccaatttgcacagaagtttacaaatacccagtcgatttgagccttgagaataagatcaagctgttggctaaatacaacttcccttttcatctgcctgccggtgagttagacacaaggacgaagccaccagctagggacatgaaggcaggaaccaccaaggtaaccgagactccaaataaaagctcaagggaccaacacaaaggtaccacaccccacaccctcctctccttccttttcagaacttccacaggatgaaacagggacctctcctcagacgtcccacagtgcaggcagccagaggggaagacagcggcggcctgaatgaggcgaccaggaaatcacattccacaaacagcagaaagtctccatgtgctttacatcttgtctctgaagaacgatgcgagtctaagtcgccagaaaaccatattcaagtgtcatttcacatttcaagcgaagaaaacagtggtagggcatgagggagacacattcatagccatgtgttctggggtattcaacaagaggtttttttctgttataaacgtataattagacattctcacatttctgtataattgatatttctgctaattaggaagcatattaatataaagtgaattccaagtgtaataatcggaggacccattcagatgacttcaggttctgctgtgtttcaactgaagaaaatggttctgtgtattggtaacaaggcgtgacagtttgtgtggctgtaatgagggctcatgttgcctccgtagcagcggatgttatatcaccacattatcttctacaaaaaatcctgaaaaaaatgaaggctgaatagacatacataccctcccaaaataatccaaatgtccatcgatacgaaaacagatgaatgacggtttgttcccaccatggaatattcctcagcagtgaaaataaactatagccacaggtaccaactagcataaagaaaatatttttaaaatgcttaaagtgaactgactaggtggaattcctcgattacaggtgtctgcttagaaagggtatggttctgaattcctgggattcagaaactaattagcaaccctgtttggaggcacatctagaaaaaagcaaaataatgacaacactatttttaattctttgtaaattataactattactatgaaaattctaaaaatgtgaaatttttcccaactgttcctttgacaagcttcaaaataaataccatgagaatacagctccagttaagttagtagaatggaaacctgaagatgtacgagccgtccctgctcgtgtagaaatctgagagcaggtatgacactgcaaggctcaaaccaactgggtatttggaaacttctgtgcaaaatggcatttttggtttttaaacacgaggtcactgttatttgtacttcaaacaggtaacagtttggttctcttggaagaaatacagccataaaactggttttaaaaatatatatatgggagtgggtatgagagagtagcttacaaattatgccagtagtggccgggaacggtggctcatgcctgcaatcccagcactgagaggcagtccccacacctttgagggcactggtctcctctgccgccttcctgcaggaccaaccccaggacactcactgggtttccatccctgcctcattcaacatccccccggggtggtctcatcgtcatctggggctcagctctgccccactttcctaaatctgacttcagagcctgcaaacacccacgcccagtgtaaccctaagtccacgtttaccccagagagtcccaattttatatgttttcccaacatcaccttagtgataatttatcctgtaaattccaactgccttcacacctcacccccgctgtctcccagcagaccccacacccgggtctgtgcatgccgccctgctctgcccacgcgggacccccccccccccaccctttctggagaaatcagctggcgatcatctcctcgtggaaggctgccctgacttccaaccctctccagcagaggcaggggccctcctcggtacttccccccaaaagctgggccaagcatggagacggcacatatcctagctgtgcctgggatgtcacgggcggggtccccagatgctctgcacacggcctggggcaccacctgaacacagcaagtgctgaagaaataaaaccgacatgcactgacctccgatagggcctcctttaccatccacatccgtctcccctctggacagtaaagtccacaagaaagggagagcttgtctcactcaccttcaaattcccagggtcaccctggcaggtaaaggggactcgaatgtcttctgaaagcagcagctggttagctgccgagttaaagggcctctgaatttcagagctctgtgtaggagtccagcacactttatcatgaatgactccaaccacggcggaactggccgtggaaccagtgccaaccaattcagggtgtgttcaccgtttctcagttcattatcacaactcactaacagagcagccgtgcacagatcctcagacgtttacgcagtgggatgacagaggggccgacggtgctgagtcacgtgaaggtcccgttgcagactgggagagaacggccagacatggacccagggagagcacagacctcggttaagtcagctccatgtaaatagcactcctgccaggccctttcctatctgcacagcttctacaaattcaactctcacacctgacacctaagaatactgcacaaccccacatgaaactccccacttacctcccaaaatgacctggcacggccgagtacaaaccatttcaacataagggaacatggccaagtacaaaccatttcaacataagggaacatggccgagtacaaaccatttcaacataagggaacatggccgagtacaaaccatttcaacgtaagggaacatggccgagtacaaaccatttcaacgtaagggaacatggccgagtacagaccatttcaacgtaagagaacatggctgagtacaaatcattttaacataagggaacgtggctgagtataaaccatttcaacgtaagggaactggagggcacgtggtgctttctcgagtccctggctgcttcctgacaggaaggcccaatgcttcaacacccctagtgaagggcaggtctcgtcggccccctcagagtcaagaaaacccatgttcactttctcaagaccacacacaaccgagccgcaaaccagggcggaatctcgactctccgggttcagatcatgtcgaatttacgacctgctgctgtggacactgcaggaaatgatgagcctgattcgggctttgaccttgagctaattagcattagctaatttcacttcccaggaccaacttccaaggcctgcaaagccagagaagggagaggagacagaacacgccctcaccgcagacctggtgcaaagcacgcacttctcagatgtgtcccaaggtgcagtgtgtccgatgcccgttcacatccaccgacccgcaggtcttctacatggcatcagcctcctgggcactcgggacaagaggtaaaatggcaaatcccctctgcagcaaaggcgaggcgcagggcccacacggaatcaaactgacctttttctgacagtctcaaaacaaagaaaatactgtacagccaacgtcccctcacgcaggtttactcacctgtgactcgtgggccatgacagaaaacttcaggttcttattagttcctattttccccatccaggaagcctttggttttaatatacaaacttgccattttgtaggccaaaaacagccaaatattggcagtttcctatggttcaactgaataaaatatgaccacaaccttttgtgaaaccatgaagaaaaagtgagtatctcaatatgtgtttccagactgtggctttgtccctgaagcactaactcttctcactcaggatttgagacactgaagaacaaacatcaatatcccaccaagagaactgaaagaatgaaatgattttgcatctaccttgaagcctttttagaacaaggcaggacacaaacttttaaaaagctccagttgtccctccatctacacagggacatcggttccaggacaccccgggtttaccgaaatccacgcgtccgcaggacccgcgcccaccctgtggagctgcatgtaggaaatgtcggccctccacaaagtcaggttttttcaataagggtttggttgggaaaaaaaattaacgtaaatgatccttcgaagctcaagcccatgttgttcagggtcagccgcacttactacttgtgtcataatctgaggcctgacagccatcgttcttgataaagggatggttaacaaactaactgttctgattagaaagcggaggaaaaagcttatttttaagccgacaaagagtggacactgctatggtgaatggaaaacagacgtaaataagcaccaaggctggggtgactgcctgtgctcagacccactaaggcctgttcctccgcctccctctgctcaaacggataactccttccccacggctaaaggaccttttttaaagattcacgcgagaagtgctatgaaaagctgaaaggtcacagataacgttttaaaaaataaaagtaacctaagtattgaacaagcccattataaatgataaaaaatgatattaagttgctgggtgcggtggctcacgcctgtaatcccagcacgttgggtggccaaggtgggtgcatcacctgagatcaggactttaagaccagcctggccaacatggtgaaaccccatctctaacgaaaattagccgggcgcaggtgcctgtaatcccagctacttgggaggctaaaggaggagaatcacttgaacctgggagggagaggttgcagtgagccgagatcatgccattgcacttcagcctgggcgaccagtgcgaaactccatctcaaaaaaaaaaaaaaaaaaaaaaaaaaaaaagtattaagttttccttccaatgaacctatcattctgccaccgaggtatcctataggtacttattcagccatgagatacatcacaggagacgtaggtgaataggacacagttcctccctgacagaaggctgcaccccaaggaaggaaggcacatactgtgaatggaatcggcatagggaacagatgctgcgggaagtggaactggcttcacagagcacccggctcaagcgtctgagaaataaggagccattggtggcatcacctgtgcctgagctggggtggtggggagcctgtcatcaccaccactgcccaggacaaagacacccagaaccacacaatgagctttcaagctcaccaaggcgatgactgagcaatgcgcatagtgacgcgaacatgcagacatgagggccacacgtggcattggttttgtgtatcgacctgagtgggccccggggtgcccaggtggctggttctgcattatttctgtgtgagatgtgtgtttgcctctggactgagtggagactaagtggagacccatcctcgccagtgtagggggcaccaccctgtccacccagggctccagggctcgagtaaaacagcaaggcggggaaggctgggctcgctccacctgtctggctgcaggccagtggcatccgtcttctgcccccggtgctcctgggtctcagctcctcagacctgggtgggatctgcaccctccgcttctcaagcctttgagccacaccctcccaggcctccaggttgcaggcagtgggtcctggggcttcttggcctccgtagcccctgcagcaagcctccccctggacacacacacaccgggctggctctgtctctctggagagccctgactaagctgcccctagaagtggtcttcagagtttccttctagccccaatatcccagtgcccccctacaattctaggtggaaaggtgaatggagacctggtgaatggagaccaatggacagaggtgtgtgccgaggacacgctgggcagcagggctgggcaggagtgcactaacgctgtcactatgcaaagaatcaatgtcacttgccacaaaaatgagaacagtaaagattccttcaaacagaaatgagtttgtttcatgatttgctcttaatacgtaagaaatcataaaagtaggcctactaacaattacgtaagtcttcagaggctcctgaactacttctgtcccttcatgtttttatacaaaataagcttgaggttaaagagaataacgtcactggccacagctggggccacacgaggacacagcttacacccatgaggtcctaggggtcctgagtcctttcctggctatttatggaaatacgggagaaaccaggaggtctgaacgtggacctggccatgcccccaggggccaaggaaagcacccatctgtccactcttccctctaccccacggttccctacctggactctggggctgacgtggcttcatgcactcagcagcgccatcattaaacgtttaggagggcctcctctaaccaccgctggacctgcagagtcagcacaagtctgcaggacacgcgtggacaaggctgatggatcacggcctcccacgaggaaagtgccaggcaaagagtcggagacaccagggatggagcagcactcactgggggaggccaaggccggcaccggccaccaccaagggccacgagggcctccctccccaccccaagggcagctcacccaggaaggtgaaagccggcaccggccaccaagggcctctcttcccaccccgagggcagctgcgatcacatttcccatcgcaccaagagacccctgcattgagcacaaacctttccaaccttcaaatcaatgaagaatcacaacatggacattccctcaatccatatggccagcccacaaaaccgacatgcaatcatcacatgcatttcctgtgggaaagtcagtctcagtccgaggcctcgcgacaggggtaggggagcatcatggggagaggccccagcctggctcctccccccacagctcctcttccctctgctcctcacgccacccctccccaccccctcctagcttcagaggctgcttcctcaaattctttccccttgatgaagtcattcattccccaaatacaaagcaattaaaggcatgagagctcaagagaaaatccacaccgtggcttgtgttttagattctcttaagtttgagaataaccaagcaagaatctttggcatctgaatgtggtctgaaggcatctgagcagaaggcctggccccagcccggagtgggtcatgggtgtctccgacatctttgtaactctgcatcaattattttgaaacatcactagcagaatagagccatgtgaatagttacttttctgttaaaagtagaaaagactgcctcaaggaacatccttccaacaacgactttctgcatcgagcctttgaggcacaggcacggcccccgggcccacctccctcatccttgcatcataaagcggcgaagaccgtgtggaataaagtaagtgaaggagtcagtccctcacaaaacaggctccagaagccacagccactctcccagcgtgggagccaagttagagacccagaaaccccagcgttcccagggaggagggcagaataatgccatttccccctagtttagggagacagcaccccacatcctctggtctcaacagaatggttagaatgaatccaccacacacagaaagtgggctaagggcttactaagacacccatttaaatacccggcaaaaacacgttacaggaacacacaggtaagtgagtttctcctattatccatgaaatatttagaaacaaatccagcaagcaatctctttgcaatcaaaagaccaattcagagttgcagattaaacatcaagatacaactgaacccttactagaccaagaacaaaccaagttccatggaagtataatcatgtcaccacttcccagtcgaaggaagcagcagtggtcatctgaccagctgttcactcgtgggtcagtgaacgaaaggcagtgctgttcaggaaaatgacgacatgttaacctgaaaagggcaaaatcgcagaggctggagggaccttccaggtaacccagcaccctcagtggacagaggaccccctggggccacagagcccagagctccagtgcattcggagcaagtactcaactgcaaccctcatgtcccaacgggcccttttttaagattccggatgtaaatgcggttgtcatcctgcttttgaggagaggggacgagctgtgttttaagcatgaacagactttcctccatgcactgaggatgcactgtgggggacagtgctgccgccgcctccccagtctctgctcagtgtgggacagggggagctcatccatctcctgtgtacacctcaagaggccgggtgtgcaggagggggcttccaggactctctctaggccttagcagggcaggcagtgcctcatgccagcgggcatccagcggcaaggaggtctgcacttcattccccgggcccagctccaggcagaggggaaagaggaacctgtatcataactaacatgtatttatgggcacacagagaccctgtagtacaaggcacagaactagaaggaatcgtggaaataagagggaagacatttggttacgaccggcagagccaccccaagcctctgcacttcctactggaaccctcagtgaccaggttcctctggagtcactgccgctgccttgcccagctcatgtcagggcagatggtgacacagcctcagcacaacctcccactccttcctcagccagcccaggggatgagctgctaataagagtgtcccaaagcctgaatgtgggaacatggaggtgactgagcagcaagtgggacggccacgacagcccagggtgtgcagatgctccggagccacccgacagccctttccaccttaaagacgacggcccagggtgttcggatgctccggagcgaccccacaagccctgtccaccttaaagaggacggcccagggtgtgcggatgctcccgtgcgaccccacagcagccctctccaccttaaagagggtttccggatgctcctcaatgacccgacagccctttccaccttaaagaggatggcccagggtgtgtggatattcctgggtgccccagagcgcttttcaccttaaggagattttcacagtctcatttcattctccaaactattcagtgaggttggaggagtatcgttgtggacaaacactgattggcaccaagtaagggcaattttataaccacgtctcaaccataagagaatcaggtctttggccatctggtcaaagctttttctgtaacaaagttggataattaagttgaacttaggttttccaaagcttgttacagaaaccacatcttcccaggtgtggctctgtggtgtcacgtgcacacatgggtagccagccttgccaagactcatggcacgttacatgttcacctgagaaggctgctcagtcaatcgttgagggctctggcgtactctgaaatgaatttgccacttcagcctacactctttactcccttgtttggttaagaaaaaccaaaaggcagaatttgttttggccaatcgcctgctgcacccaactgtagaggttttaattatagtactttcattgcatcatagaaagcaaagtcatacagataaactcattaccactccaaaggttcagtaaatctctagataatcaggcaaaaattttaggaagctacattaaggtttacaacactcaaaatttaaaactacatccatgcttcaaaaaccaccattcccattttagatgtccaaatgcatatgtcaaagtaagaaacgtgctaagtgcattttttgtaatcttacggagaaactgccgctttaaaacggcactagttcctggctccagatggatgtggtgggttggctcactcaatttcaattctacctgaagctgggaaactaaaaatgcattcccagactccagggcacgagagaattcccacttctggaaacagcctggaatgcagacttgtggcagagacttccttcctgcccaccctaactgtcctctgtggaaggcaacaaagtctaccccgtaagcagaactgcaccacgaaggaccatttcaaggtgggaggcgcccactgccctgactgcaggcctgccagcatctcagggccagccgaaactgttctctccttcacagggaagggggaacaaggccaggaggaagcggctggggacgcaggcgatggggtggctgatcggggatcagaggtttcctcagaggctgcctgttctccagaggggcctcaggctcgggtaaggagagaacgggaggaaccaagatttggctaacacgcgttttgttctgattgatcagtgggaaccggcagtttagctaatcacttatgaggcagagaatgggtgtttgaagtcctgactctggccttgtccttggtaaagggtcacctgcaagtcagcctaagccacatgggaaggggctttttgcagtaaataaggtcggggtgggggcggggaatgtcttaaccatcactgtttacaggatttcaggactcaggcaacgttcagtattgtcacacaccaaggtttttacagtctgaagaaaactcctgcagtcctaaagtgtcagttctcaaagcccttaagttcctcctgctgattctgattcccagagggtctccgcttcttgcaccgaaccccaacttgcacaggcacctgtgtcttcctcttgcagcaaatgcagctgagaaggctgtggctctgtggcagtaatgataccatcgcagccctaacaccacagcagagcaatggctctggcctgaatgtctgtccccaaaacctcacgcacactgaagcaatctccgatgggatacgttaaaaggtgtggcctttgggaggcctcgctctcaggaccggggttggtgtccttgttggaaggcctgaaggagccctcctgctcctccgccacgtgaggcccagtgagatgttgccgtctgtgagcaacaggtcctggggcaccagatctgcaggcaccttgacctcggacttcccagcctccagagctgtgagctacagatcacccaatctacagcagcccagacagtcatgttacaacattagccactttctcagtgggccagaggcctcccgtgagccaccaccataaagcaagaactccctggagaatggaaacggggttcacaaggaattctacccagaaccagggtgtcgatcctttttcgcagaaagatagctgggccatggcaggaaactacagggtgggtgaggccggacagcaacatgtcacctgctcgtctaagcttcagtctcccgcctctcaacacaacagtggtgataacacccctcaccggagccgttgggggaggcaagagtgctgggtgattaacaattgttagctccatagaaattaggcaaagaatccaccctacgtcttataaaaccaaaccagcccaggaattccacatcaccactaatttgcacgggaaaatgctggattatcatatgtaagttctggcatgtcatttgtgttaataaagtctgcagagttttcatatactaagtatataaaacaggaaaataaatcatgcaatttggaggctgaggcaggagaatcacttgagcacaggggggcgggggttgcagtgagccgaggctgcgccactgtactccaatctgggtgacagaatgagactccatctcaaaaaaaaaaaaaaaaaaaaaaaaaaaaaaaaaaaccaaccatgagattttgctgcttcatactagtaatgtgggcagattctataccccaacccttattcaaaggtcgcctaacactgactcaggacctctgtctctgatgtgcttgaagttttaatcctaacacgtcatgtgttaaagaccactcccccaggagctctgaacaagtatatcaggtatacctggaacaagaccatactgtgatcgaaatctaactttaaagacccaaatcatagaaccacagaagacactgtttctgtccaactatctgttctgccatcgtttgtgtctatttcccacaaaccatctcattataatttagggcacacaaaaggctgatacaacagggttacttttcaaaggtctggaggtgaatagatacaatgcattaacttcctattgctgctgcaacaaattaccacacacgcagacctcctctcacagccctgaaagtcaggagtcccagggctgaagtcaaggggtcagtaggctgcattcctgcctggagtctcccaaatcagaggccaccatgcagcttggctcacagccccacacccctccgaccactgccccagcctcagccccacacccctccggcccggcacccctccaaccactgccccacccttggccccaagcccctccggccccagctccctcatcagccccacaacaccaccccaccccccagccctgccctcagccccacaccccctctggcctctacctcatcctcaggtctcctctgaggcagaccctcgtactccctctcatcaaggcatgtgtgtgaggacactggacccacctggacaatccagggtcctcccccatctcactgtctgttacgcagtcacatctccaaagcctcttttgccatgtaaacttcattacactaacaagcatttaacaagtccattataatgacgtaaaaattggcattgttttcctcctaatgaacacatcagtcacccatgcaacctataaatatttgactattaaatatacaataccataggagacaaagatgaggaaggcagttgctccctgaaagacgagtggaccctagatggagggatgaacacattcggaacagaatcaatgtaactcaacatctgagtcggagaggccaagcaataagactttcaaaaaagcaaccagaaagtaagtacagtgtgcctgtagttcacagctgagcctggcgtcatgagcgcaagcgtgcggacacgcaccctgggcccaagtttaagatcaaatataaggagctttcaactttagtatttaactagatcttattacaaaacagcttctcttgattatagtttttatccaaaaagttctctaattaaattaattttcccctaaaagacatttgtcaatctattgtcccatataaactaaatgggtatattaaagaaaaaagacaaatgtttaatttagggggtttgcctatgacttggataagcatgattttcttctggccaagcagggagaagccagaccatactggagcgaaggaaaagcacaaatttccactctgacctcggctgggcacccgagtttctgtcagaagtggctatggtgcttcccacacaccagcctctgataaaactcagcccaagggtgcggggaaaaggccatctacttccgaaagatctatgaagtgcagacacatcaaaagcttcagaagactataaagcaccaaggagaccactgcaaccttggagtttacagaaaatggtcagcatcatgcgtgcctgaggtccagggtcggctcccagctgccgcgatgccgtgagcgcagccctggcttcccctctgatgcagagagctggtcactccgccggctgcactcagagctcagaaccttctagatgaaagcaacgtgttccttttaaaatggggaacgggggcagcagaactgaagctctacgactatctcaactactgggtttcagggacacgttaggaaatcgtgagactccaaatctcaatttcatacagattccagattcactacaggttccagaatttcctgaaacattctttcaatttatcactcatgattcccttgcccaagctaataaaattccttacagaaaaactaccataagcaccacaacaaataagatcaactgatgcccgcccttcgcaccacataaactgttactcacacaagactgtgctggagaaagctctcagcttaagccgaatctgtgaaactttattttccccattttagatggagtgtgaagactgtcagcaaaccagggccccaatatgaagcagagaacagattcctgacgcctgcctgaacatttcattgccacctctgtcttagatattgatctccctcagaactactcaatcacccacatttgcaggtcacttaaccagccaccaggataacataattatgcaataaaaatgccttctcagggctatgatactcaacaaggaagctcagaaggctgggtaagcccaagaaaggaggaagcgtcctccaaacagacaaaaaccaaagaaaaccgggcagagactctcaggagagcagaaacggagcccactgcagcctttcaggccgtgccatttccacatatgcatcctgctgggcccatctgaaaggtcccacttgcgagacgttcccccccacttccggctcctgtaagactctctgcagccccactccacgccggggtccgactgtgcaagtcttcctggcgagaacccccggagcctgcgcagcgtggagaccgggaagcaccaaagatacagaaacccacgaacccgtttctcctcgcgctgctttctgggttctaagttgtcctcagaacgagtcctgcataaaccctgggctggggtgccagccacggcccagcagcacctggctcatgggctccacccacccccccagaggaccactgaggccccagcacgctctgtccgagggggaagacaccagtcacagccacacagctcagggcacggccactcgccccgctgccgtaattacctgctgtgatctgaattctcattggttgggaggggatctcacggccccgctgccgtaattacctgctgtgatccgaattctcattggttgggaaggggatctctcgccccgctgcggtaattacctgctgtgatctgaattctcattggttgggaggggatctcacggccccgctgccgtaattacctgctgtgatccgaattctcattggttgggaaggggatctctcgccccgctgccgtaattacctgctgtgatccgaattctcattggttgggaggggatctcatggccccactgctgtaattacgtgctgtgatctgaattctcattaggaaagggatctcactgcttaagcactctgctgcctccttgcaaacaacaaaaaatccaaaacccctcttaaagaacgtttctataacctcaaaacaagacccaacccgagaccagggaagctacacacgcacatctgacatctgacatctggtgggcgtcagtgacggacgccacagcttccgtgtggcgtgtgaagctggaggcctgtcatggtgactcaggctggggtctgaataggggccttccaagcaactaggcagccaggacgcacaccccaaacccaagtccctgcactcatgtacgtggcagaaatgctgcgtggccatcaacatcacttaggaaccaagaccgatctgtgtcccgtggcccttaacgtccgtacatgcctgggcccagcacggcctgcacggcaccctgctcacctcggtggggctctcctgccaaggaggatggccctgaagtccgctgagatttccaaagctctacaaagtcgtccttcctcctgcttattcagaaggcctaaagcctcgaagacaccagtgagaactgacctgcctcttttaaggcagctcaaacacctaaacacaggaacggtcctcagctgagctgctggacctctgccctcgagagcagctgataacccactgggctaagaaggcacagacttcattatccagaagccagtggtgctcacgtctgcattccaggagccgcctacatgagtccctccaagacttccaagtcccacttgatttttttcattgtatccctctataacatcagagacgttatatcttaaatggtatctatgagatcgtctctacctttatgagcacgtatgctccctgacttaccacgtggctaaactgttctgataaacccagcataagctgaaaatatcctaaatagaaagtgcatttgacataatagtttcgacttacaacgggttcatccagaggcagcccatctcggcccaaacgatgcaatgagtgtgactagttcacgccataaggttgaaaaatcacaagtgtaaacattgtgagccagagaccatctgtattgcggcttctgtcttcagagacaatggaaacctcttcttagacaagaatcacaatttataatcttcaaaatgttaaactaaaattagtttaacaatctacaggttcaaacaaagccaaagtaggcccacaaggccatttgtgtcattcgctaagacgtacgactctgtaataacccacaccacagcccctcagtgtgggtcccagaggtggctgaggcttgcggctacagacaccgtaatgaaaccaaaatcggagtccgcaggtgcggtcaagtcatatgacttctccactagaatatgcacaaatgttcatcagcaaatctggtctttgatctacctccctctcataacctaaaaaggaacacacacaccacacacacagccccaacacacacacagcccccccacacacacccccacagccccccccacacacaccccacacacacagccccaacacacacacagcccccccacacacacccccacagccccccccacacacacccccacagccccccacacacagcccctacacacacacacacacacagcccctacacacacacacacacacacagcccctacacacacacagcccccccacacacccccccacagccccccccacacacagccccccacacacacacccccacagccccccacacacacccccagccccccccacacacaccccccccacacccatccccccacacccacacacacacccacacacccccccaccccccccacacacacacccccccacacacccccccacacacacccccccacacacaccccccccccccccccacacacacatccccccccccacacacacatccccccccacacacacacatccccccccacacacacacatccccccccacacacacacatccccccccacacacacacatccccccccacacacacacatcccccccacacacacacatccccccacacacacaccacttcaaaaacaattcgtacttgcattcaattctgggcattcggaatagacctaatgggggataaacctctcctccaacccattgcttagtcttcttagaggatgaaggattttacataccacgagtcagcatataaaagatcttgtatagaaatatacttgcaagtggttctcattacagtgatttgactaatatacaaaggaccccaacacatggcacaatgtctattagaagaatttgttcccctaaaaatcctaatatctacacagaagaaaaccctataagcatgattttgtcatcactttaccagtatagtcatataaacaaaaggagtatcacaaaagcaaagggtaagaccacgtttggtttttatgactcgcagttctaaatttaatatgaaattgctaaaaccaccaagacaaacatgactacaaaaatatttaatgatcttcacctaaattcaagtcaccattcaaccaccaatacctctgctctccttacaggaactttccaaaagtaaattctggaattaacaggacaagttttttctggtgatggaaattaggaagaaattggttgaaggctgttccctggctgtcagaaactttttctcaatagtattttgtaaaataaaagcatcaaatagatctttacattcacttacaatctatcaaacaatactggagcaagcttgaaatactagccacatcctatcagggctgactaacattcaatcagcatcagtctctcctttcagcatccacagctcatcttctcaaacccacttaagatttcataattaactcaattaaaaaacaatgtaagtcatctcctttatctttgacatgaagggctaatttccccccaaaatagttcctctttccttgatgtgatttagtctgtggttagagtatttaacaggataacttgtgtttctttccttcttagaaaataaaatacatcacctttccaatatcaaaaacactaactgataatgctataggttaaccaggtcaaaagcattttttaagaagttaaaaagaacctaactgcatctttggatcttatgtgaggcaatgtccagggtcactgggacccctgcttggtcagtgcagccgggtaccaattagagacagaaacccaagcgttcactcaaagccccttcccagcggttcttcctagtggaagcgaggggcacaaaggaatgcggcattccaccgagggctttggggacaggctgcttgagaacatcaaagtggctcacgtcccccaaatataaagccagtgactgctcccagcttcaatgcagcaccgtccacagcagccaagatccggaatcacctgagtgccggtcaacaggggatgaagggaatgtggcctgagcatacacaggagcagtactccaccacacagaggagagagccctgtcatccacaacagcatggagctggaggacattacattaagcaaacgagccaagcacagaaagaaatggtgcatgttctcactcatgagcaggagctgacagcagatgtcatggaggccaaaagtaggtggtcagcagggcccactcataagcagcatggggagaggctggtaaggggcacaaacacacagcctgacaggagcacaagatctactattgataaaccagcaggggaatgtcagtgggtcacctactgtgtatttcaaaacagctaggagagaataacttgaatgttactagcacaaggaaaagaaaatgtttaaagtgaaagacatcccaattacccagatttgatcaatatagggacgtatcaaggtatcacatgcaccctgaaaatatgtacatatattatgtatcaacaaaaacaaaaataaaccaatgacagaatcgtttgcgaagcaagtgcaggtaagaacggggagccagacatggtgtggctgtgtgtccccacccaaatctcatgctgaactgtaacccccagtgttggaggtgggccctggtgggcggtgactgactcatgggggtggtttctaaccccccagtgttggaggtgggccctggtgggaggtgactgactcatgggggtggtttctaacgccccagtgttggaggtgggccctggtgggaggtgactgactcatgggggtggtttctaaccccccagtgttggaggtgggccctggtgggaggtgactgactcatgggggtggtttctaacccccccgtgttggaggtgggccctggtgggaggtgactgactcacgggggtgctttctaaccccccagtgttggaggtgggccctggtgggaggtgactgactcacgggggtgctttctaacacccagtgttggaggtgggccctggtgggaggtgactgactcatgagggaggtttctaatggtttagcacaatcccaagtgctgtctcatgatagttctcatgagatctggttgtttgaaagtgcatggcaccttccccttcactctctctttccggccatgtaaagacgtgcctgcctccccttcaccttccaccctgattgtaagtttccccagatgtagaagcctgtacagcccacagaacagtatgccgattaaaccttttttccttatcaattacccagcctcaggtagttctttatagcagtggaagaatagcgcaggccgcaggaccagcaatgttttccttctacccagcggccatcaaggtcccgcactctagctggttttccgaagcctttgccagagcacagactgtttttgggaaactaactttccccatctctggcaaaccagatggggcatcctatttgtctcttaccacctttctcagagaaaccccacctctgaaacagcctcccaccagggcctctttagcagcagaaaagctgagcattccttgcacttcccttgctctgaacaattaaacatcttaagcttcctttttttccatcttccccactcactgaaaaatcatccgatgctattttcctaaggcacacacgtaggaaagcagtgccatgagagcaggggctcttgttctcccagatctgagcctggccctcaaacaccagctgaattcgtactaacatgatattcagaggcagaaatgcaaatatccccacgacttcaaataccctaggatctaacaggcccagtgacccatgtaactatggtttgtgctgggccattcaactggtgtccgaatccctgtccaagtaagctctttaatttcaagattttcagacagcttttttttaagggatctattatagttaaaatcaagaataacccaggacgggtgcggtggctcacgcctgtcatcccagcactttgggaggccaaggtgagcgcatcacctgaggtcaggagttcgagacagcctggccaacatgttgaaacctcgtctctactaatacgaaaaatgagccagccatggtgacgggcacttataatcccagctactcaggaggctgaggcaggagaatggcgtgaacccaggaggcgaggttgcagtgagccaaggtcacaccactgcgctccagcctgggcaacacagcaagactccgtctcaaaaaaaaaaaataaaccaatacacccacttaattcttcaccgatgtcaaatatatcagctaaaagaaaaataatatgaaagcatgtgtttacatttcaatgttgaatttaactatcttttaagaagatatgaagatggaaagaagttccccaaggatggaaggagaaaaagcacagttaaggaaattttaaaacctcaggagaaaaacaagtgtggggtaagacctcaaggcaaaatttttctttgcactttgatttcaaaagaacagagatgcccaaaatatgaaccctcccatctgcatcttatattcctctacgtcctttgaaaggctggagatgggatcccaggttccaaagggcccggccacagctcacatcaggtggcatctttcacagccgtttactccgccgactgtgtctagagagctctgtggcccaatttacacaaaaaggtcctaatttacacacatgttcattgctttgaacagagtctcaagaaatgagacaaatattgacgctccacagaagcaagtattctcttccggaaagtcaagaagtgtcaggttcccatgagccaagcagcttggttacggaaagcactggctgacttgctggtttactgttaaatgcatgtaaaattttaagggatccggcccccctcccagtgggtgtgcacgttgagctggctgcagcagtgatgaacgctgaccacgttctttcctgcagttttgcttcaagcagagcatcccacacccaggaagaggtcacaggacagcatggcccaaggtctaggaccgttctaaggagagctacaggctgactgcctcgtctgcaaaaaacagtcactcatttcaggggaaattaccagagttcataacatgtgaatttttaaaattcagatttctaatttcatcccattagaacttttgaagaacagatgtgcacctgctccaagccagtgagaggacgctcggacagtcccttacaggtcctcggcctccgcctcccacctagaaaacgtcagctagagccgatcacagtgcagtgcgattttctataaataatgtgcacgcctgcatctgagctgagatgtgaatgtctggaacgtgcctgccaggcccgggaggaactgcagcagctgtggacacaagcccactaaggaatccgatttggagggaactcaaggcacctaaaactggttccactggtttttcttggcaaggcttgaccaggcaaacaactgcattcgtctccaccctggaaatatgcgattccttacctctcaataattgtcactgtttctaattcatggtaattgggatggggacttaacagcaggtaattagagcaattgcagaatttgctactgaattacaatggcagattcctgagaatggaagaactgttgcccaggaatggagttcaacagatcctctccacaccctggtaaacatggcatttcgcacacctgctttggtcccccagccaccctcctgatctcaacaggtcttccctgtgccccgggaaacatggcgtttccacacacccctgctttggttccccggccaccctcctgatctcggccatctgatggcatcactccccacagctggaaacacctgacctcttgtcaccctcccatctgccctgccttcctccagcccaggatattcagggatacccacatacaggaccaggaaaccaggcattatcctaaaccagtgcctgcattcaacgtcctccatggcaggacagtcaccaacagccaacgctcccagaaccttccacctcaaaacaggcacacatctggattcaagctgacaacgctgcattctctttgccatgcacacatggaggcatgtcaggttccacctaaaaggtatcactgggttccacggtggctaggagcccaagccgagtcacacttggtgatctcaattcaccatccacacagagaagcctgcagttttcctccagtgtatggtgtggatgatgggtgcatttcccctggagactcggagacgggagcctggccaaggaggccagagtcaccccagcccccgccaggcctggacatgcacctctttgtctgcacacagtacccaagtctaacagtgccggctctgtggtgggatccgtctcggcctgcagaggacccggggcacaggaaccatgcagcctggctgcagccagaggcctaagggatccccccacgaggctctccagccaaggtgccctcaccacaggcacagccgtgcaagagaactgcctgctgaactggaaacgtcccaatctgctcggccgacacaaagacaacagccacctacagctgctgagccccgaaacatggccactgggcctgaagggctgagtcttgaatgtgatccataaagttcctttcaagtgtgtttagctgtgtaatcaaatctttattctaatgaaatttaaaggagcctctggctacgggctcccttgccgggtatcgcggctccagggagtaggtatgggaaggagaggcccagagcctctctgcattctccacactgatccaacacgtcatcataaggaaaagcactccagcaggagaggtgtgcatgggaagaactgggttggccctgacacaagcgtgacccccatggcatcacagttgcctcagccaagagacaagagacaatgacacccagctggacaggccaccagatgtgatgacacagccgaagcgctggtcccacgccagccagaaaccaccagctgctcgtcccatgtgaaacaggcagcgctgtcccaagccctcattaagaaaggagaattaaggaagcaattcccgtgattcccacgacacacgtgacacttctcggagagagacacaggcttcactgtgaaagtgcagaggacggtgcggtccctaggcgggctgcttctcccaacgatcggggaagaaatgagatctgtttccctgtaggaaaatcatttgtaccgtgattagacagaagacagaaggtggctgatgttatcaaatcaccaagcactgcatggctgcttctgcaaggagggcctggaaactcgcagccacccgcataggggccacggtgtttacaatggagacacaggtgactatgaggtctggcttcctcagggacgctaaatttgaactttcgccactgaggaatcagtcatttacagtcactcaccctcaatgcagaagagggctcaagacactgcaccagacttcaactctcagggttagggtcagagtcatcaaattcaccagttttacaaaacgtctatttacttcggatgccagaagagatgtaggttcatatacacacacacacccgccccacacacacacacagggtttgcttagcctcttcaccagcgcatttcaccgacagatgacacatccatgcctcatccatggcaacacagaaacccacttggaagacagccactcccaccaagcttcttgactttagtgtttaaaatctgcgtctcatgcgtgagattacactcctccaaacagacattgcgcctgtgtcacttcacccaaaagggctttaggaaacgacacgcagcccagatgccagagtttgccggccgtcttactctagcctgattcctttgtgcctgtagggaggctccacagatacagcccgctcacattaatgaccacatgagaagctcagaccatagacaaactcagtgctgcatttttccacatttatcacccttttgttttatcctgaagacgctgagaaaggctggggcagatctcctccttgagtgtaatgactccaggcacttctcttcacccaggtcatccctcagtcacacacacttgagaaacaaaagcaattctgttctcttcactctgggttccaagtactaaattcctcgattttatcaattagattatcaagcagccgtttgtaatctggaccgcaatccgatacaaaatttaaagctaatttaggtggcagtaatagctcctatttacgttacagacaagcatgaatgaaaactttaatctgtgtttattgtccataggacccattttgtaaacaaaccaattattcaagcaaggattgtcttcagtcagacgcaaattaatttgctttgttcataaaagattttcttattttaggaatttttaaatccatggtctgcatttcccaagcctgtctctgcacagcgggacttcccagggcatcccatcagcgggcccactgaacagaataagcaggcagcccccagaccaggaatcaagtctgagccccaacagcccctcgcccagccagggcttcctcaccagcacagcacccagaggtctgccaggtttaatgccacgtgtgcgtggagagcagagtgcgggaaggaccacagtggacattctacaaatgcaaattccctcctggaatagcccagcaaccctgtgtaccttcctcaaagtacccaggccaggcaagcatagagagtctaatggggtgcctaggaatcagcatttaacacaattctgatgaaaatatttgagagccacgcccatcagcgagaggccgccgtggcctctactcatttgcaggctctgaaaagacagattcagataacaggccagacaggacaaggatggggaggtggagggcaaattccatggaccaccaaccaccccccatccccactgagactccgtgatttaaggaaagaaagccagggagggactgagatttcacataaaatgcgtagcacatggctaagggccaaggttaggcaagccaggagcacacaacggggttcacaggcccagaggtgcccccacacccagaccccatgcagacctcccaggcactgcctctgtgcctcccgcctgacttatttcctgccccccgcccctactgtgttggtatctcagccgccccctgaaatacacgacctccgccccccactaccgcacatgcctctctacaaacttgggggactgcaaatagcagcggggtaagagctgggctctagggccaacgtcctggctgagacactagttccaccccactcagctgtgatgtgagcccctgagatttctcaaatgtgagatgggaatggtaactgaacccacttcccagggtggctgtggagactgagaccacacatggccatatcacggcatccagcacacgtgggaccctagccgtgttgcccttgatgggaatccttctatgcaccctctgccaccagggccaactcccaacagtagctgtggagggtgtgtcctctattcccactccacccacctcccattgctccacgcagtgacctgccacgtagcggccaccagcaaacccagccccactgtccaggctcctgtggataccacccccccacccccacccctgcttggggcgtcttccacttgcggttccgaaggaggctgagaaaccaccctcaagggcgctcacctgctccttgttgcacgtaatgacctgccacacagggcaaccagcaaacccagctccaccatccaggctctggtgggtaaccgcccccccagccccaggtgtctgggaggctcaaaaactgccctccaagggcactcatctgttccttattgcactaatacctcgtttacagaaatccactttgacttccctgcactgcaggtgtgacaatttaggaatcctgcttgcttgtgagctccaagagcttgaggtcacgtccacctcaccagcatcccaggacccagtactgtcccactctgtgattgtgtgtttaaaattccaaaatactctttcagaatgctattggcatttggtctgcacataaaatgctaaaaaccctcaagtgaaacaagtatcttcaacagtttgattcaatcatgtgagttacacatctgccaagttgtaaagcctcatgcatttttctgataatattttcttatgtatggtcaaatggttcattaatataaattacaagaatctctaagaaacaggtttttttctggcattagatgaccaaaggaaaactgggttctggctggcttgcaggcctggagaggcagacatatctgctgaaacacaaccaagctccttcccactgacatggcctcgtcccaggcccctgagccggacgcccgcaggcccctggaggagcaagctgacctgcccacatttctcaaatgcacagctgtcgctcgcactgcagacagagctcaaggcacgagcaggcgcccaccatgctaaaaataccacacagcgtccacgccaggtgacggtggctttcactccatcccaaagctccatgtatgaatttagtcatgactactaaataatgatttttagactctcatgacagactttgtttgcttttatgcaacaaagttaaaagactatcactcagctacagcctctgaaaccgtggaataattatttgggaacagagcctctgccagatcaggataagtgcttgggacaataccccgtgacctcggtccacacagacacgtgcagaccagagccctcccgcactgctcagccacacggccacgttcaggctgaagccgcacgatcgccagaaacactgtccctcgccaaggtatgcctggcttctccctttttccagaacttaacaaaacctgaaaggacaggtctgtgtagaaaaacatcaaaaatacttccaattcttctttccagctgaggctgcaggaagctcatttcagccctcactgtgttctgactgtggcctgcttcccataagaaataaaatcagaattctagtcgctgtctcctgagctgtgtggcaggcggacataccttcagttatgtgaggaaaggcacggtgagcccccttccttcagtaaaactgcagttcccagaacactgatgccgtccccctaacgccactgtgaacacctggacaagtcacatttcaatacgtgcaccttcgtgggctagttttactacttctctattaaatcaccccaaacttagtgccccaaacaacacgaacttattttctcacatttctggaaactggaatccaaaacaggtcccaccagctaacgtcgagatgtcagcagggctggctccggggaagcgaccgtctccttgcctccctcagcctctagaggcttccgcatcccctggtccttatggcacccaccatcttcagagcccacggcagccctggcggctcctcaacaggaagacgcagaatatcgggagcacaggctttatgccagggccaggaccaagcccgcccgcccgccctcccacccagctcctcacgcactcccgtgcgagctaatatagattccactttaactagtgtcacctgtgcaaggggtaagtgcccagctgtgaacctggttaccctcacccacacagaccccaggaataaactcatgggccatggaccactccacaagcaatgagtgaccacctggtcggggacctccatggcccagcagagccctctggtgcctccccatgggcccagggaccggcaggctgggctctgcagcgccagagagtcctggataaaaatggcagctcccgtgttgggaggcacccgcccgtggatgggttccctgtactttaagtagaccaggtggacaagctacaccactcacggctccatcactagaataacagctgcacgtggcaagtgcacggggtggccaccccttcagcccagctggctgcactaagcacatcaccggcaagacacccaatcagatgcagctgctggcacagcccaggtgtcggcccccaagaacattctggatcacaattcacagtagtgattgcgatcagggtcacatgtggctgaatgtatttacggaggacgccacagccgatctggctggacggagagcatttccccttgtatagtcttacaaggccattttatttgtgctttattcaatttttatggcttttttctgcctatctattttatgggagtgtttcttgttcttacaactgcagtgatacttcaagctacaactatcaatgtgtaaaattagtttggaaggcgccttatcattaaacgtttcacaagcaagcagtcagaggcacctaaaccacaggcctgttttcttctctgagccaaacctacattggactcaaagaaaacggcacacggagaggggctggatctccagcacccattcctagggggcctcctgaggggcagatacggagggagaagccctgggctatggcaccgtcgtactaaagaaaagtccatttgggtaaatttaagcaccagacaagaaattaagcaaaccatgaaaagaaaccactaaccacagcttctccaaaacagaactaaactacctttagtttgaattggaaaagcagaagtgatgatcaggatacaaaaaaatgacaaagtatctgaacacgggagaataaacaagggccactgtctcctcctgtgtcagtgggagcctcgcatctaagctggatttagaaggttgctactttggactgaaagttatccccaaccctgctttgtaagcaagtggagcagaacgcttcaattatttcaacgtttagtggtaaagctctgcaactctcaaaaccattttaattggtgtgaattttatagtaactaaatctgtcggctggagtatctaacggcttaaccacggggtcatgtgggaagattattccagttgtttttgtttttcccactgaagatgcatttgaacgttcttgtagttttcagttggctggttctgacgtttggtcctgaggaggcccaagtacctggagaggaagaatctgaaacctcaagacacttgagtgcagtcttcagagagggagaccccgacccaaggggccactgacggactcaacacaggcacagggccgcccgacgcaacgggccacgtattcgccacttaccaaacaacataagcacacacccccaggtgtgcacacaccttctgtacatgctcatctgtgccaatatgagcacacacccccaggtgtgcacacgctctgtacacatctgtccctgccaacacccacacacacccccaaggtgtgcacacatgctctgtacatgctcacgagtctgtgccaatatgagcacacaccacccccggggtgcacacactatgtgctcacgagtctgccaatatgagcacacaaccccaggtgtgcacacacgctctgtatgcgctcacgagtctatgccaatatgagcacacaccccccaggggtgcacacacactctgcacatacatctgtccctgcagcctgagtcaaacagtcacagagaggaagaggaggaggaggaaggatgcgatgggcactgaggtcttgggccggctcccctccctatctcgggggagacccctcgtgtgatcctgccatcactcacccttccgcctccatcctccatcctcccacgtggatcaggaggacgcccactgcacagagctgtgatgagcatgaacaaaagacggcaggagctcatgccaaggtgctgagcacggggcctacggagtgcttctttctgctgcggctgacatcatcaaacaagaggttgacatggcttccggagaggatgtcattcgctgataaactgaaacatgtgacctagaatctactgtgaaggtctaagaacaaaccaacaaaccaaatggttttgtttgtttttcaaacaccatagcctgttttttcttttttttaatgctctaccgtgtgtcttagtttaatttcaaagtaagtccaataaatacacaaaatcacaggactgagcattgagcattgtttccctttgtgtcctccagcctttaggacacattaaggaaagacatgattccaggattcccattagaaaggctgccctgaggcacctgctggggctgccaagtcgcagctgttgatgctgcccccaagctgcttggatgaagcggaagattccagaagtctcttctcctccacccctcgcccaggagagatggtagggggagggaggagggggagggaggagggggagggagggaggaggggggagagggaagggagggagggggagggggagggggaaaggaggaagggggagggagggagggggagagaagaagggggagggagggaggagggggagggagggagggaagagaggcatgttccatccaccaaagcagctgcattgcagtgagaatggaaggcgtgttgcctctcagaacagcgagttcaagctgtttataactgttagcataaacagtgaccagctgaggacagggctgtaattggagttgacaacattttattttcatagttgatatcagggacctggacctaaagcaccatgccttgccctttcgccgatgggccaatgcctctctatgcttgagtccatttgactaaatacccgatattgacttggaattatgacgtgtaggataccccttaccacagtaacgtcaaactcacgttcttcacgttctaaatgtaacttgctcagggactggcttctaactccaggtgggaatgttaagctcagtccagttcaattcaataagcatttatcaagaaactactagatcaagagctgtgttagacactgggtatggggtgatggggatacaaagatgtggaattagagctcgagaagctcaaatgctctcatttaattccctaatgcaattacccagcttcagcctgatggctgtaatgtctaaattcactttttctttattccaattctacagcgcaaagcataaatcatcacagaggaatgattctgtgttggaatattcagtgcacagagaggtgcattctgacaggcgtgagacattgtcacccttcccagggagccagtgaggtggctgcacggagcacgcgtgtgaagattcaggagcacgagcatcaggtgacaggagggggcacggaggcagcaccagatggatgtgtgccgaggggatgctgcagccgggctggcgagggaggtcacaggaacgggcgcaggcatctccctccagccgcacttgacaggagggggcacagaggcagcaccagacggatgcctgccaaggggacgctgcagccgtgctggcgagggaggtcacgggaatgggcacaggcgtctccctccagccgcacttaggttttcatgaggacgggtgcagagaaggggatgaaaccgaaatgctgtggggctgaggggaggaggggagggatgcagggctgagggctgaggggaggaggggagggatggacacaaggccaaggggaagaggggagggatgcagggctgaggggaggaggggagggatgcagggctgaggggaggaggggagggacgcagggccgagggctgaggggaggaggggaaggaaggacgcaggggcgaggggaagaggggagggatgcaaggctgaagggaggaggggagggacgcagggccgagggctgaggggaggaggggaggaggggagggacggacgcagggccaaggggaagaggggagggatgcagggctgaggggagcaggggagggatgtagggccgagggctggccactgccccttgcatccatgcccctatgaatgctgccaaaatcagccccaacagtgagaagtgaggtggatgaaagaggcggacagacttggcttccacagccttcacagattatacagtcattaaaaattccttctgagttttcatctggaaaactttgcaaatatatttagagacaagaggtcaaagatgaagccaacacagttgggctcgaaccgccaccctgctccttctctctgcacccgggacccgccctgagcccctgagtgcgaggactcgggaactgcccagcccaagggcgcagcccctgaccagagaagggagccgcacggcgaggcccccagcacatggatggagggatctgttatctcggtcccagggtcccaagcggggaaggcctggggctcccagctgaagctttgctgtcacctctgtcaccaaagttgagaaggactgagtgggaccaaagccggacctgccagctcctcggtggctgcagatggggccctcacgctgcaggtgggaccgtctaggggagcccacagacagcatcaaaaatcacagccacaagtgctccaggggccccaaaacacaagcacagcctgaggaaggcagcgcccgctcagctccacatccaggcttttgtgcctcactcaagaggcacacagcaccagaacacggctctttaagtgcctttctagggtgtacgaacacaaagtggggccttgagtggcttggaagtcactcccaccagcccacgggggcccgggcagcccctctggatgtggctggagtctctccagggcgggctccaaagtcccacggaggaggcgagcgtcggtcttgctctgacctgaggcagccccctgacaagtatgctgaatatgcaggcacacagctggctgactcatctgaaagggacctgctgagccacgagccagggacgcttggagagaacctgactgacacatgaaccctccccaggagctcacctggggcacccacgagaaaactacggaagctgtgaagacggaggtgtgcatgtggccgggagaacccggggggggagccgcactggggacagaggggtgggccccacgagcaaacgagggaggcgctcggtgccctgaaggccccgctgcacccacagctgcaggcctggccggcggcgcaaccttggctgccagggcccaggagcatgtgtgttgggcaggagctgcccagccctcctggagccgcactatgggcaccgtcattttagacgcaggtgcctgatattaacgatgacaatcaaccatgccaccctgaattacagccgtgtcctcagcgggtcactgtttacgctgacaattacaaacagcttgaactcactgtcccaagaggcaacaagcccttcattatcacggccgcaagcctctgcgcagccctcctcccccgccgcttcccgtcagggcaacgtgaagtcccatgacagtgactcagagccagcacagtagcttcagtgcagaaaaaaaatcacaaaaactcaaatacatcctaaaaatgggcagttggtaggagccgattcctaaattaaacactgttcggaggctttctgggctagcacagctctaataacaggcttacgctttctgctccctgtgaaaggccgcgaagaggccgggctctgcctttctgcaggctcccctacggggagcctgccctgtggcctcggtggcctgtgccagacagcgtgaccgtcgcccacagggaacactcagcacagcagagcaggctcggggaaggacagaaagtgacctctagcctgcagaagatgctaagccatgcacggcctcacgcacactgcgcttcaatcacggctgaagcaggaacgagctcttaatagttccagtaaatgcaaaggccgccctggaaaactgcgtgaacctttctgactactcacaggtggggagccactgcctaagacacaaaggtaaagaagtaacctgaaactgcatattataaaacttacttttaaatgagggcacctaatttaaaagactcccaaagaacactgcattagaaagtgacagagtgaaaccatgaggctgaccacaggagtccctggaaatttcaccaaatgttgtgtcaaaagagcgttttgcaagctgggacacagagaactgcacctgatgaaatattcaattaatcacttgagtcctccccacatacgaagctatttacaaagtgttcccagaaggtaaagtgagcaggaggtctgtgaacacacaaagcaagatccacttcgtccatggaccacgacaaaagaaacgctaacgagggctgacactaacgagtgccgatgacatgctagagtccaggcctccatgtgcacctgtgacggggacagtcagggtctcactgtccagatgggaaactggggcggaaacaccagggagcctgtcccagggtgcagagccagtgaacagtggttcatactgggccaatcccagctgccaggctctggggctcctggggacagaatcctgttgacttcactctggggtgggaggggcggcagcatcccccaaaggcacctggagaagtggtgttaccctccatcccccatcctcggtgttaccctccgtccccccgtccccggagttaccctccgtcccccgtccccggggttaccctccatcccatccctggtgttggtcaccatcctcctcacctccaggcccctctccttgtcctccctcattttcctgttcaccgagagcatgtcacatgactcttcccttttcaagaggctcagctgcacccagaggcattccggcctattcaggacgggggacacaccctggggaaatgcctgcatggggccagaagggcctgagcccctctcactgttgcccaggaaggatggaacaccccacggtcacgccgattgtcaggccctctcactgttgcccaggaaggatggaacaccccacggtcacgccgatcgtcaggcaggatgaaaacatcggtgtccaaaatgtttttttcactacaactgtttggaccattcgtgaacgaatcagttaaataccaagaagggccattcccatttattctttggctacagttttccacccaccagctaccacgctcctaggaattactcctaacgcagtatcagtgccttgtgccttttaggaaaacctccttccctccagctttgtcctccttccacaaaaggtgcctctgactgcctcgctcgccgtaccaggatttcgctcggctatggaggaaaatccgcgtggggctcagagatgggtggtccccgcacacgcagtggctctgtaacatcctccaaggagcctggcccaggcctgccccacacaccaggactctgccttgtggccctcaggcccccgaagctgctttccctccaggcgtcatgccccgggcaagaaggccggacaagggcccagggctgctgtgggtcgggaaaccctcccgacacctccctctccaaaaccccccatcagcatcccagcatctggacctgtgtcaccagccgctctgccgtacaagagaactggattttcagctgggttcgctgcttccctaaacaaagtagggttttgttactgaggaaaaaggaaaaagcgggcatcttcttggcaacctcgcgacatccagccgccggttctcaccacaccagagatgtccacccagggcagacagtgtcttcaaccgagcgccactgacccagaagtgcagtaattagtacactttcaccagagtcacccactccttcacctttacacccaagaataacatgtttgccaggcaaattagatgtccgggaggtgtaagggaaaccccaagcctgctttaagcctcagacttttgagatcgttgagggccgtgcacgcaagagcgaggctgcgcccaaaagctctgctcctgccagacgtcacaaacagaccgcacggctcagccacgtggacgcttacaggacttcacgagaggcaccaccgtggtacacgtgaagacgtgcacttcattcagcctcgaacagaccacgccctcattacggggttggtgacccacctcccaccatcagtcccccacctcacccagggtctgtgtctgcatctgtaacgactttgctgttttaccggggtactaaaatgcagcatcggaatgtttaaaggtctttaaatatcaacactctgggtccagttttcggcactttaatgcggacactcgatgcaggcctcactcaccactctgaggtagctcatacctttcctacctaaccaagcaagaaactgaggcacagaacgtggcaggaaaatatgcagcttctaagtagcagattaggattcaaaccagtgctcttcgtcacattgctgacctacctctcaggctgagataacgtccaaaattaaccaggtagaacagtgttccataaatcagccagaaatggtccttgtggatgggcctgtggttattccctgaagaacgagaccattggcccaaaaatccacctgtgtcacattcaaatgtttacatatccaattacttaaaaaataccccaatcaagcatgtttacagccatttacagccatatagattatctgctttggtgacaatcaacccaagacctctgttggcaacgggcatcatgccaggtccagagagggtgggacagagacacaaacaggaaacgctctgtccctgggagcctcgctctgatgggcctgcggggacatggcacagaccatgcggcacaggcggaaggcggggacacggcacagaccgtggggcacaggcggacggagggccaggagaaggggctgtgctgccagcaggcagtgctttgagctctaatggatgaacattgctaaccagcgaaggtggagagagggcacccgtctgagaagatgaagaggcagcaaagcacagctggcctcggggaaccggaagccacagggacatcaggctgtgtgctgctgtctgtcggccaccagctgggggactatcctggacctggaagggcatccctgacactccccaccagatgccaggggcacccccagccccaggtgagaaccacggatcccatggcgaatgaggtcagcctgtgggaagtggggctgggactgctctgcacagcttaataggaaagttgggttctatttggtggggttttggtcatgccaatggctggtcagggctgtccgtgaggaactgatttgaggacaagttagagaaggggctgccgaggccagtggggcactcgctgtctgggtctaagaaaaagaaaataaaggctggtgatgtgacagttggtgggagcacagacggaaggaactggcggtggagacacacggttggccctgcacagggctacggtagctacctgggggtcatcctattaattctcctcatggtcccaagaggcggctgtgaggatccctctcctgaggacaaaactgctccagagccacacagaaccaagatccgggccaactccaaagcgggcgatcttgacccctcacccgtggtcctgaggcagggatcggagccccctggacacacagacactcccaggaactgcaggaatgggaagtagataccccagaccagcggcaggacccagggtttctgcccctcagggcacactgggaccagccactgcataggtggacacatggtgctttaacccacactgggggaaggaagccctcactctcagagtggagaccacagcctccagcaggcccagcctcactgctttaacccgtactgggggaaggaagctcaagctgtcagggtggagaccgcagcttcaatcaggcccggcctcactgctttaacccgcgctgggggaaggaagccctcgctctcagggtggagaccgcagccttgatcaggcccagcctcactgctgggcacagcctgaggatcgccatacatgatgctgaggtgtcccaacgttggggtgcccagagccactcagccgagaatgtggtgctttctgtaactgccctcatttctttacagtatagatctggactccatcctttgcaatgtgtggggttctaggaagaggccagccagccgtggaagtgtcctgggctctgtcccggagacgacgaacttggctccccacgagggcggcctattccccacagtgtcccccgggggccacacctgcacccaccttgctgaagataattcgctttctcatccgtgaaagaataaagtcggattaactcatctccacactcacttccaactctaacaacctgtgttaggaaatcaaaggtaaggactctgaccacaaacccaagaagcaaaacccgagactcacggaacgacgccaccattgcagttcccagcttgactagttgtttttcttttctggtctgttctgctcttttggtttaaataattaaagatccttgttgacaagtaaaaaaaattctttatgaagctaaaaaaagtggttctaattaaacatttaaacattcttccatatacttttaaaaacagttgtaattatagctctacttaatgttaagtactttaaccaaatgaaaggttaattatacagactggcaattataaaaaataaggtaacatattcatggcattatgaataattaataagaactcttcgatttcatttagaccagggattctgtgctaatatgctctcagctgtcttgaaataatggtgaaattttaaaattagttttgtacttaaacatgtccccaaagtgaagcacagcggccaacgtccgtcacggtgccgagcagtgccagccgctctaccatggccgacggcctgattcccaagggctgcgtcccggggccgtgctagtgcagtgaatgttcaggaaacagaccaggtggcaggagggagtcttgtcctcaaggaacctcataagtcttgctagggggacaaacaacgagagaatgaaactggcagccatagaatccgggccttgatgcccaggcctcgccatgcatacctgctggccggcatctccctgagacccgtctggcacaggcaacggcagggcccggcccttggagcacagggatggcagagcagggtcatcgaagcaggtggcgtgcagacagtggcttctccgcaagagctcctggctctcagggagctgagggctcctcaatggggaattctggctgagctccaggggaaagcgggttggaggcctggctcctccgcccccatctcctctgccccaaccctggaagggggtcagatatcaatgctaacatttgtgctgactcaattaattcaaacgattcacaaaaacaaacttgcttaaagtattaatttcctaaaaagaactaaaatgagttcaaataattcacataattaaattattttaattgttaatttaattaaaacatctcagttttcaaagcaccacgtgccttggtactttctccttattacatgtcccatcttccagggaggtttccttccacccactgtagcagcggattctggtgtctcgggtgttcccaggcttccgtcagcccctggggggtttacagttctgcagcagtctccatcctaattaatctgcataagaacatccgtccgcagggatgtcctgtggccctgtggccacgtctgacatgcagctaaacactggacgtgtcacctggcgacagcggatgatgaaactgtgggcagggtagcacctctgggcgccaacactcttaacatgttttttttttacaagaccattctttaatgggtgaaccctgaaaggaaacgctaaagattgtttttaaatatttttatatagagacaaatctttatcaaacattcactcaatgctaaatgtcacttctccagccaacccctttaaaaaatacctaaaactaagactggaatgacaccttcaaacacatactctaataatgcattcccgggagcagagagagcttagcagcttaatgttttcatgatatacaagcatgaagtttggcgaaggcattttcatatgtttacctgaatattttaataaaatcaaaagatccctttcactttaatactctacttagaatgtaattttccattaaataaatagtcaatgttctgtaacccacatgctgataaacttcaaaactttagaaagtattaagcgtaatcaaagattacttttaatttttgagctgggaagagcctgtgccagggaacagagttgagattgaagagataaaagcacgattattttatgaaagaaaagcgaaattcataaaagagaccatgtgattctataaagcaacacagaatccgttttcagaagaggcaaacgtggaccacaaaacgccagtgttgcctgtgaagagagaaacagttaaaaggaagaattcgcggtggcccagtataggtcaaggtgtgggaggacagggaggcgatgaaatgatcctccttctaacttcccagaaaggtacaagcggccagcactgtaactggaaaccacgcgggcaccagcgtgaactcagacccgacagccagcaccgtaactggagaccatgcgggcaccggtgtgaacccagactccacggccagcaccgtaactggagaccatgcgggcaccggtgtgaactcagacccgacggccagcaccgtaactggagaccacgcgggcaccggtgtgaacccagactccacggccagcaccgtaactggagaccacgcgggcaccggtgtgaacccagactccacggccagcaccgtaactggagaccacgcgggcaccggtgtgaactcagacccgacggccagcaccgtaactggagaccacgcgggcaccggtgtgaacccagactccacggccagcaccgtaactggagaccacgcgggcaccggtgtgaacccagactccacggccagcaccgtaactggagaccacgcgggcaccggtgtgaacccagacccgacggccagcaccgtaactggagaccacgcgggcaccggtgtgaacccagactccacggccagcaccgtaactggagaccacgcgggcaccggtgtgaacccagactccacggccagcaccgtaactggagaccatgcgggcaccggtgtgaacccagactccacggccagcaccgtaactggagaccacacaggcaccggtgtgaactcagacgcaacggcaccctcctgggctgctccagccaccaccagaacccgttctgcagctgaactcgaagctgattctggaaggaactgaggaggatgaggacgagatccttctacctcaaccgggatcaattttttaatgatttctttcttttagaaaaatgttaataagatactttgttctaaaatgaccaggatttcagcagcttctacatttcttcatgtcaatcaaagcttaggcacgtgggttacttcactgttctctgtaccctttccaaataaaacccggggccgcctgtgtacccaagagcctgggcactgagcagagagagaaaacgtccagggcaacagcgttcacattccggcggtgccatagagcagacggggggagtccgaggcggtgccgcagagcggacgcggggagtccgaggcggtgctgcagagcggacgcggggagtccgaggtggtgccgtagagtggatggggagagttcgagccacaggtggccacgcctcccctgcctccggccggtgcccactgctcacgcattcctctctcggcccatcctgagccagggggccctcgcgtcacccaaggccactgcagcacctccaggaacaaaccacccacagatggactgctctccatgcaaggtgcaaagattgtttttaaaactgctcggctctggaacttatcccagtaacaggctagattaagaaaactgactaaaaacagtaggaggaaaaactccctccacccattgaagcacaagaaatgcaaacagcctctgaaataactgcagacgagttttcctgggttaggtacgcggtggggtgaccctaccccatagcggggccccggcacacagtgggaactgacgaacatctctgaataaatgcaggaaaatgcactcaactcccaaacagagacagaaactgctttttttccttaaaagcttctctcttttattctcaaaaagactctctttggtggcttcactgctgaagggacaagcctgttgtccccctccagcaggctggccgccttccagaaagcagtcctggacagtctccagatcctatggccctcacatccaccttgcctagtgatcccgcattatgaagcctaatcatcagaaagagcctcccagtccacagctcaggagtggcgttttattcagggaaacactaataaaaacctggggctcagcgtcaacgctgtcccctagatactgaggctccacacagatggcacacagacaggcctcaccccttcctggtgccccaagtctctcctaacattttattagctgagttttctggcggtttgttacttttcacctgcccgtccaaggcagctacactaaactacttgtccagggcagatccactcgtaatgaccatcagctcagagttggaagtagcgctggagaatgaggtggtttcaggttgctatgcttccctgccctctcttccagggatgccaagtaagtttctgccgtggctgatgatgtcagtactacactgaaattagttcaacggcaggccaccaattagtacttactgaacaacgtccttaagagtgaaaccctgtctctactaaaaatacaaaaatttagctgggtgtgttggtgagcacctataatctcagctactggggggctgaggcaggagaattgtttgaacccaggaggcagagattgcagtgagccaagattgcaccattgcactccagcctgggcaaaaagaacgagactccatctcaaaaataaaaaaaaaagaaaaagaaaaagaaaaagaaaaaaatgattctcacgacactgtcaacatcttaagttcttccggagggtagcgtaaaattatcacacacaacgtaaagccaattagatcaacattctgtcctcaccgatccatacctaaatccttatttctaattggcccccaatttttcagaatttaagaagactgagaggaataaccacgaacaagcaagatttacgcagacgtcagtcttcccaactctcgctcaggaactcaccccaaactcctcctgtggaatcagcctggataacagtccctggtggctacacaagaacagagagaggattccacgaacccatgacacaccccaccctccaatccaaggcagaggagagaggcggacagtcacaaaaaccagaagagcagggaactgtgattcttctgatttaatgtaggtgattgggccaaaaaacaaggcaaatccacctgtgaatggggtgggctcccagctggctgtggatatgaaggaactcactttcctgcacactgaagtccatcagcgtctccacatcggccggcacctgggctgtgatcgcccctcacagactgggataacagtggcctcatctggacaggttgtcaaggatggatggatagacgtcctggacagacactgtacagagaccagggactgggcagggggaggtggcacagccttagggccagcaggggcgaggccgggaagccgggtctctggggcgttgagggcccatgggggcctgggcgagggcctgcgtctcctcatccaacagaagcagaagcggccgcgcagtgtgggctgcagctgcggggaagcagctggtatgacacagcaggaggccgtggccagccctggaggaggggcccagctgcgggcactgccccaggagccagcatcctgagcccccggggaaggcgggaaattgcccctgggcactgggcgctcaggctggaggtggtgagacctcgaggccctgcagtcagggaggcgagggcagaggtggccaaactgcagctcagtgaagggtcttgtcaggaaagacccccagaggctgcctcaccggcccaggggaagttacttccagcccagaggctcaacggggtcctcggtggtgacacttaaccttgtcctctgacagacgatcatcgagatagagtcactcaaacctctgccaagctctgcacccaagtgaagccgttaccacagatgctgaggcaggcagtgctcatctcaaaactgtacaagtggtttctttagccagttctccacattcttaatgacaatccacactacatgtgtgtttccagcatcaacctgtgctcatagctacatacaaaataactttatcacaaggaaaactaggtggtgaacccaggaggaggaaatccccacaagtcgacagaacaccaacggctcgtcggctcgtcggctcttcccggctgaacccaagggtgcttggcttgactcacttccataccaatttccagatgtatttttactttcccacattttcattatgaaaatgttcaaacatatttaaaaagtggaagaacagtacaatgagtggccaagttttctccacgtggagttccgacaactaacatttcggtagatttgctttctcactctctctctctgtagattatacagagagacagattcgtttctcctctggagccagttgaaggtgacaggctcctgccacctcgccgagtcctcacgcacgcgttccctaagaataaaggaccctctgcagccgcagaaccatcatcggcagacaagaaccatttcagagcatcgctgtccactttatattcaataagcacaattctcccgaaaacgtcttttctatctgggccacacactgcgccgagtgactctccttccccatcttcgtcagggacagcctcacaccctttatctgtgatgacttttcgagagtctggggccaacgtcctgcagaacgtcccccagatgcatctgtctctcagggcatcattaaattccctcttatgcacctcagttccctgtaaacaggaagtttcagtctcgaggcgcaatcaccttccgtcatacacttctcagcagcttcccggtgaggctgctggttcacgaggggcgggagctcctagtcctgctccccgacggcatagctgcgaccggcaccacatgggactcgtgtgcaccagcacccacatccccgcatcagaaacacctggaggggccgcgggcagccgagacacctggaggtgtgaactgcacaggcgtggggcaagaacagggtcaaatcataacataacgtctgattccacacggtcccacctgcgtaagatggtgacatttccctaccaggtatctgaagccagaaaatctgacagaaaattcacaacctgcctttgtccacctaggctgctgtaacaacacaccataggctgggcgggggctgacaagcaacagaaaattcacaacctgccttcgtccacctaggctgctgtaacaacacaccataggctgggcggggactgacaaacaacagaaaattcacaacctgcctttgtccacctaggctgctgtaacaacacaccataggctgggcgggggctgacaagcaacacaagttcatttctcacagctctcaggctaggaagtccatggtcaagacctgacaggtttgtctggtgagggcttcctggttcacagacggcgccttctcactgggtccgcacacagtggaaggagcgagggagctctctgtagtcccttttatgagggcacaaatcccatttatgagaccctcatgacctcctcaccacccaaagctccccctcctagcaccatctcctccggggtgaggattccaattgtgaatcttggggagacacaaacattacaaaagcccatcatttaattttgtttaaaggcatttttgcttctacaaagtctcaagataaaatcaaaacaaagaggtcttcagaggagtcaatccacacagttctcccaaaagggcaagcaatcgattgccaccactttttacccaagacccgctgagtgccctggtctgcatgactgattctaaatcaccgtcctctcctctgccactcagaggtcagagtcagtccagagcttaacaccaaggcagagctgactgagagacacaagctcatccattaagacaagccaagactcctgcccaaggcctaatccctccaccagggaaacgtggaagggccagatgcctggcagcccttccttcctcttctgaagcccccgagacacagccccggccaggtgtgtgcctcgggcaatgcacaggtaacgtcagctgggcaccgagtctgagaacatgttctcaagtaaaaatgaaaacaggactgctgtgaaaagctcatgcttaatcacctctgggctaaattctaaatgcaatgttatttcagagctaggtggaagtaattccttaaaaacatatatgaacagtaactagcaaccagggtgataagtactcagtatgtgtttgatgaataaatgaatttttaaaatttatgaaaagagcacgctctatttaggagaattctatttaatttgatctcctaactataaagtggctccttcgtgctgacagcagggtttgcttcagttgactcaaaaaatggtcactctaacaggaaaccaaaaggctttacagagagtcaaattatggtgccaattcaactgtgcatggcaatttcacctaaatatttaaattctcgaagcaccgtactcagaaaacaagacataacataaataagtgcatcgcctcaagcactatcacctagaacttgacaaagtttgactgtgagtttcaagaaaagggctgacgaggccaagaagttccttcccctctccccttacctcccattttggtgacaaacttaatgcagagaaattcctgtttcaggtttgccagcattggagcaatcctggcatttattcacccaggacactagaaggctgaagtctgcagggtgcacatatttaaaatcacgggagcactggagtaatggaaagaggtgcccgcgaaggcatcatcctttccaggacaggctctaattccgcctccgggcccttttgcaaaaagccatttctacaaacccacggccaccaggaggaaacacacaaaagaccccactgccctcctggcttcccagaaggcctcagaaggacgagacacggagcccgcacacaatcctggaccctcctccttgcattcagtttgatgcatgtcacctgcctgcatgatggaggtcccacaatgggcacaaggggacccgtcaggtcgggaggatgctgcccggctcacagtccacacatggggacgcgtcaggtcgggagggtgctgcccggctcccggtccacacatgtggacgcgtcaggccatcagggtgctgcccggctcacggtccacacatggggacgcgtcaggtcggggggtgctgcccggctcacggtccacacgtggggacgcgtcaggtcgggagggtgctgcccggctcacggtccacacgtggggatgtgtcaggtcgggagggtgctgcccggctcacggtccacacatggggatgtgtcaggtcgggagagtgctgtccggctcacggtccacacatggggacgcgtcaggttgggagggtgctgcccggctcacggtccacacatggggatgtgtcaggctgtcagggtgctgcccggctctcagtatcagccgcatatgcacattctccactgaagccactgcatgaagccacgctggaagcactttctggcaggtttaggaagctcacgtccaaggtcattaaacgcatggcaagctcgccttggaggcattttactttgctaatgacaacgaagcattctcattgcactgaatagtttagagcagtctttcatgtccactgcctctttgaaataggcatattgtgcctgttttacagattacatcaaggccctaatatatttagttccttgtcccaggtacacacaaatcagcgacatcactagaacgtgttttggaccacgaaaagaaggaaaatcacagcattatccattgatgctgcttaaagcgtatttccagatgtccctcccccgcccggcctgtatccaaggcttccgctgaccacgcggcatctgctgggcactctgcgcgctttctcccacacccgccacgcctgtgggcctgtgcatgtccctccacgcatccccacgcggctaaatctcccacacccgccacgcatgtgggcctgtgcatgtccctccacgcatctccacgcggctaaatctcccatacccgccacgcctgtgggcctgtgcctgtccctccacgcatccgcacctaccacgcggctaacacacacctcccacaggtggcaagtgcctgaacgtccccacggctggcggggctcccggtgcaggacacacagacaggcacggccgccccgcccacggccaccaagggctttgctttgtccccagaggtgcccttcgatggggtcacacggcagatggccaagtgttagataattaaggctcaggaaatcaccgcagccttacctttagaactcacctctcccctgcacttcaacccgaagggtgggtcgccagagctggggaagagatgcccaaggctcccttgcgccctgacagcctcggactctgctcccctctgttggtttcttactgcacctcaataaacttagctcacagcaagaggcgggcatggccagagtagaaacacacgacagaccccgggtagacgcgacgggggacgagggtgcgtgccgggacgagggtgcgcgcggggaagaagctgcgcgcggggatgagggtgcgcgcggggaagagggtgcgcgcggggatgagggtgcgcgcggggaagaggctgcgcgcggggaagaggctgcgcgcggggaagagggtgggcgccgggaagagggtgggcgccgggaagagggtgggcgccgggaagagggtgcgcaggctccgagaacctgggggcagcaaggccggtcaaggctggagactccaacagtggcagcagcaagggtgttggccaagccacagagacagccccacccagaggggctgcatgaaccagcagcgaccctaacccaacgtgctcatcggactgggcacacgcacacgctgtggacacgtgtgaatatgttccaattaacgtgatgctacgtaataatcaacaacgttaaccccatggcttcattacatggcatctggcacattgagactttttattctgtctctcttcctatacaaagaagtggaaaataggtccaagatcattcacaacaaattattgctaattgcaaaaaaaaaaaaatcctaccctcaccttggaagatctcaaggcaacacctcgttctttgaggtcatagtggggacgctctccggacccctaggtgagtctgtgactgaggggaatccccaaatgggcagttttggggccagcacggacgccagccatgcatccaggcaggtcttgtgacctcggctgggtcaccaacctattcctgcactcagaccccgccaggaacgagggcaccggcccgcacatctctgctcccgaggctacatcccctacgttcctctgcactgctgggttccatgccttagatcccaggcaccttaaagctgatgttcccccaccagccctcatgaagatgatactcacacaacgcccctcctctcccacctggtcagtacccagggagaaaggaacccgggtgtcagcttgattttctgccagtacattgaaaaaacagctggccagcagcactggtgcacagcactgccaggctacccatgaggaaagctaagtaaagtcagatgtactcaagtcggctgcggcaagtgcttctacatccctgctccaacaaggaaagacaggaggccaggcgtgtgtgtggctcacacctcttgtccttccttgttggggcaggggtacagaagcattttggggggctgaggcagaagaaatgctggaattcgagaccagcctgggcaacatagcaagaccccatctctacaaaaaaaaatacaaaaatgagccaggtgtggtagcgcgcctgtagtcccagctactcagggggctgaggtgggaggatcacctgagcccaggaggcagaggttgcagggagccaagattgcaccactgcactccagcctgggcaacagggcgagaccctgtatcaaaaaaaggaaagaaagaaagaaatacaggagaccactaataattccaaatagtgcctactaatttgaaatcttttccagatatgatgaaggaaattattttccttcctacaccccttctaaggaaacatttctatttttctgctacacaatttggtaacctgccctttcagatcctggcctctttaagcaggactcgctggtgtgctagcaaagcagtgctctgaaacctcagcatcctcagacccacctggagggcaggtgaaggatgctgggcctccgcctcctaacgtcacactggggtggggcaggtctggggtggggcagggtttgcacttcgaatgcattccagtctagggccacatcgccctaaacacgcccatctcatctaatgcatgccagagggaggagccacacggggcaggtcacagagcaagtgtccaggcaccaggccaccaggtgtctatttaaatgcaaaccaatcaagcagcttaagtcaaacagcttcaccctcctaacacattggccaacacaactagtgataaatatcactgctgttagaccttctgctcactgatgaccagagcaagggcctgaaacatcaaagctgaagggcgtgtgccacggtcagggctccgcacacccccgtcccaggccatcgcacacgggtgccctcaccggcaccggggtctcacagaccagctccactctcacacttactgggacacaaccaccctttcagcccttcatgcgtctgtaccctacagcagtgttcaagggaggctaatttaagaaaggaatgtaatatggacatctgtgaactcttcctcatatccactgagtggtcctccagaaagagaaagattaaaaagaaaaagaagatttaagaatcaaacacagggccgggcacggtggcccacacctgtaatctcagcactttgggaggccaaggtgggcagatcacttgaggccaacagtttaagaccagccagaccaacatggcaaaatcccgtctctactaaaaatacaaaaatcagccaggcatggtggcacatgtctgtaatcccagctacttgggggctgaggcaggacaacggcttgaaccgggaggcagagattgcagtgagtggaggttgcagtgacccaagatcgcgccactgcactccagcctgggcaacagagtgagactccgtctcaaaaaaaaaaaaacaggccgggcacggtggctcaggcctgtaatcccagcactttgggaggccaaggcgggtggatcatgatgtcagagatcgagaccatcctggctaacacggtaaaaccccgtctctactaaaaatacaaaaaaattagccaggcgtggtggcgggtacctatagtcccagctactggggaggctgaggcaggagaatggcacgaacccgggaggcggagcctgcagtgaactgagatcgcaccactgcactccagcctgggtgacagagtgagactccatctcaaaaaaaaacaaaaacaaaaaacaacacagaagcccgtggaacaagcccttgccccagtccacgtcacctgtgctgtgccacccaggagcatgccaagctcaaagagtcatccacctgccttgatgtcactactcgaatcacagaggctgagattccctaaccctcgttatgtccatgtcactcacaagcaggcactgggcccccacaatgcacagggaatccctctggccatccaatgaccatccattgataaataaaaagcattaattccagctgggttgcagagttgcacacatcaatacttgttactgttcacaaatgttccacctgagggtggagtgaagttacagaattgggaagaacttcacagacgtatgagggtgtatttaaggaaaaagtgtatggaagaggtgagaaaatagaatatcctaacctctgtctttttatcaccctctaaatcctatgattccagttctgttcattctgcagtgaaaaataataagtgattcacactcagacacaaggtggcttaggaagctgcggctgttttaaaaagatgaaacaatctagaaggtcaggattccgtgagcgtattccttactaaaaaagagaagagactgggagttacacatcagcttgccaaggctgtcctgaagtccaggagcccctcaggagaacagagaatgtgcaccttctgcagaccaaggcaggtggccgggcccaagagtggggatggggaggctgcaggaggcttgcagagggagctgtcccgccagcctctggcagaaactcctgactaattaaaccctgacagcaactctgtttagtgaattgtctcctggtcactaagaagagtgaagctgttgaaagcctacagccaaccctctggataatagttgagacgtattttagagaaggaaacgatcccatcacaatcccagacttgcccacagctgcaggcgcgtcctgggagcgcggcttcttgctctgtcagcaacacggcccgccgtagagccacacgggttctgcctgacgcccccacttcagggagtctgggcaggtgcagctgaaacaacgtccgggggcaacccccacccccacttctcaaaagtacacacagaggcagacagaatgaaacacggcccccaaatctcagacgtagggttcagcaacacggcccaccatagagccacatgggctctgcccaatgcccccacttcagggagcctgggcaggtccagctgaaacagcatctagggggcaaccctgcccctacttctcaaaagtacatgcagaggcagacagaatgaaacacggcccctgggcctcagacatacaatttagcaccagcatctgtgaaacaagaacaaaagtcgcatgggaaagtgagcataaaaatgaaaaaataaccgaattacagtgaagatggatgagatggggaggactgtgaggaaggtgagaaagggactgaggacctgaagaggcacctaaaagctggatgttcccgacaagacaagaaagacccctccggatgaggtgggacatcatcttcatcatggaaataaaggggaaaagcctgaaaacatcagtttcctaccatgaagcaaaaatcaaactggcctcagacttctcctctacaacactggattccaaaagatgaggacatggcatccgtggggtcttgagggagagctggcatgaacgttccagagctgagtctccagaagcagccaaaacagcctcagatccagcagagtcttgtcttgaaaagtctatcagagtacacccccttatcaaagtggcacacggctgcagggggtgtggtgtaaggtgatttagaaatccttctccatgcagaccctaaacttgggaggccactggtcacaccctggccacacacctcagccagcaggaagccctgtgcctcctctctgctccatctctaacgccaagaaacattttactcataaaattatgttatttcccatctgttaaattgtatatattaagtccataaagagaccaagagaatgtataaaaacattgatgacttgatggtggtattataagtaatttttaaacaaaacatgttgtctaaattttccagaatgaaaaaatactctttttaacaagaaaggtgcttttaaagtcactgtaaacaattatatacccatcctatgaacgtggtcttaaaaagcaaacagcaaaaacagaaggaagtgcatgaatatgttgataacgtttatctctgaatggggggggctattttgcctatttccctaggtttgacgtgtcacttctgtaatgtaataatagagcaaacacaatagttcaggaaacactgctgaccactaggacataaaccctgtctcccccaaaatgctgcgtcccccgacctctgattttatcttttaaatcagctaagttttctcccctaaaaagaagcatattgtatcattactctttaaatttaggtgagttaacaggcacacagacttaaacactttctggaaaggtgatgtgtagagtttaagatttattttgttctgagaagagcaggggcacgttcccaggtgaggggcctccaggaaacactggctgtgtcagctgggccctcacctggagaaacgcatgctcgaggcctccactctccacccagccccagcaggaatgtggtgcagagctgacgacaggcccatctataaaaaccccaagggctgtttccaggagcgactcactgccccgtgccccccgcaccctgtccccctgtgcaggtactggagctgctgtccagcctcccccaggctctccacacccacactccacgcctccttccaccccacgccaacctgcaccacccaactccccactgtctcttactgaccacccgcctcgactcccccatagcctggaaactgcaaagctgcctggcagcaagaggggacgggtggcgaccgcaccagccaggtagcacctgctcctgccggcctgcaggatcacagggcctgcctcatggagccgtctttaagcacaagtacagtgagaaatcaatgcagctttagttttactttgctgttaaattaattttataacacttggctataacgtacattaatttttatagcaattactaaaataacaactcataatgcattcattcaccatattaagccaagcaactgaaaaaccaaacacacaagcagaattttataggactgtagtagtttttgttaggctgtcaaattattttaagctcaaaattaaagtaattaaatctgtgactctcaactgggggaggtgggcacacacagagtgtggaagtgaaaatcctttttttcttccaaacctcacacagactcggttggtaatttccattgctagaattatgttctgttccttaggttaaaaacaactgccttcatacctattaaaaacaatgtttcttcctttcctgagtgaaagtgaaatgagccatggtggcaagctgggcgagaacagagggaaactgagtccatgtccacatttgacagtaggagagaacagagggaaactgagtccacgtccacatttgacggtgggagagaacagagggaaactgagtccacgtccacatttgacggtgggagagaacagaggaaaactgagtccacatccacattggacggtgggagagaacagagggaaactgagtccacgtccacatttcacagtgggagagaacagagggaaactgagtccacgtccacattggacggtgggagagaacagagggaaactgagtccacgtccacattggacggcgggagagaacagagggaaactgagtccacgtccacattggacggcgggagagaacagagggaaactgagtccacgtccacattggatggtgggagagaacagagcgaaattgagtccacatccacattggatggtgggcgagaacagaaggaaactgagtccacgtccacattggacggtgggcgagaacagggaaactgagtccacgtccacattggatggtgggagagaacagagggaaactgagtccacgtccacatttgacggtgggagagaacagagggaaactgagtccacgtcgacattggatggtgggagagaacagagggaaactgaatccacgtccacattggatggtgggagagaacagagggaaactgagcccacgtccacactggatggtgggagagaacagagggaaactgagtccacgtccacattggatggtgggagagaacagagcaaaactgagtccacgtccacattggatggtgggagagaacagagggaaactgagtccacgtccacatttgacggtgggagagaacagagggaaactgagtccacgtcgacattggatggtgggagagaacagagggaaactgaatccacgtccacatttgatggcgggagagaacagagggaaactgagtccacatccacattggacggtgggagagaacagagggaaactgagtccacgtccacatttgacggtgggagagaacagagggaaactgagtccacgtccacattggacggtgggcgagaacagatggaaacagtccacgtccacattggacggtgggcgagaacagaaggaaactgagtccacgtccacattggacagtgggcaagaacagagggaaactgagtccacgtccacattggacagtgggcgagaacagagggaaacagtccaagtccacattggacggtgggcgagaacaaagggaaactgagtccacatccacattggatggtgggagagaacagagcaaaactgagtccacgtccacattggatggtgggagagaacagagcaaaactgagtccacgtccacactggatggtgggcgagaccagaaggaaactgagtccacgtccacatttcacagtgggagagaacagaggcaaactgagtccacgtccacatttgatggtgggagagaacagagggaaactgagcccacatccacattggatggtgggcgagaacagagggaaactgagtccacgtccacatttgagggtgggcaagaacagagggaaactgagtccacgtccacatttgagggtgggtgagaacagagggaaactgagtccacgtccacattggatggtgggagagaacatagggaaactgagtccacgtccacattggacggtaggagagaacagagcgaaactgagtccacgtccacagtggacagtgggcgagaacagagggaaactgagtccacgtccacatttgacggtgggagagaacagagggaaactgagtccacgtccacatttgacggtgggcgagaacagaggaaaactgagtccacgtcaacatttgagggtgggagagaacagagggaaactgagtccacgtccacattggatggtgggagagaacagaggcaaactgagtccacgtccacatttgatggtgggagacaacagagggaaactgagcccacatccacatttgagggtgggtgagaacagagggaaactgagtccacgtccacattggatggtgggagagaacatagggaaactgagtccacgtccacattggacggtgggagagaacagagcgaaacttagtccacgtccacagtggacggtgggcgagaacagagggaaactgagtccacgtccacatttgacggtgggagagaacagagggaaactgagtccacgtccacatttgatggtgggcgagaacagaggaaaactgagtccacgtcaacatttgagggtgggagagaacagagggaaactgagtccacgtccacattggatggtgggagagaacagggaaactgagtccacgtccacatttgagggtgggagggaacagagggaaactgagtccaggtccacatttgatggtggcttttaatgcactgcagggtgtgtccccttgaccttcacgaattttcaggtagtaagaaagcaatttttcttattggaaaggagaaaactaagtgactgtaaaataatataatttccttaaagcaaaacaacagagaaccaacttttccttttttcacattacccaataattctaagactcagggttttgtcacgttacagcaaatgccattcattgggggaagtcggaagtcagaacagtgtgtgctattcaaattctcgatgaataattaactcaaatgtgttcagagtgctataaaatgaaattaatttatttttagtttaacccaaaatccccaatcacttgccaaatgatcctctatgtatcctacataaaagacagggtctttctggcagaaaaccattgaagtttttatttgcagtaagagaagcatgccttattatcaaacaggtgcatggtccccttgtgggggggtgcccgtcacctgcgtccccgtgcgtcacggcgttgccgcacaccattaacacatcaaaacggaaaaggaaatgtaagcagtgtttgccgtccaaagttcacatcaacaattccttattaggaaggcaattctgagcctttcctcctgcatctgggagctgccagcaacccagttccaggagagaaaatagcttgacacctcctgcggcccatggagtcctcccgttgggacaaggaccccccaggagagagaagaccccagcagagtcaacactggaggtcctgcggggtgggtggtgctggggaggccacacggggagggctgttccctgttcccttcccctcaggagacagctggcccgaggtgacacagcactggatgcgatttcagggccagggaccatggtgcccggggctgtggaccacgccagcccacagccactgcaagccccagaccggggctgtggataacgccagcccacggcagccacacgccccagaccaacacgagaagaacgcaggccgacaacatcttcatctatggtaggtgacccggttatcgttcctaagagagtccacggccacttctactgggttccctatactcttcccctgccccagctggtccccccatgacagccgtgtccctgagaatgggatgcagagccaggagggacgtgggccccttcagtttgcaggggctgccaggcagcaccttccacctgccgagggccggaggcggggaagccattccacagcacgtgagctggcaaggggcctcccagccttagagcccagatggcttctggccagagtgctctgggccgaccccccctcatgctcacttccctgcataagtttaagttgttttctgtaatttgcaaccagaatcctggctgatccaccatggaacccagatgtcctcagttctgcctcagcccccacttgtgagaggtccgtggcataacacaaactccccctgggattcgtgggcctcacgggggaagctgagggtgtgtccatgcaggaccccgaggctacacagctctggctgtttctcttccaaagccggcactgccctctctccatctctcccggtgccagggctcaggccccagcccccgtttctgcagaagcccctttccatcctagcccctgccacccctcctgctcttgtctctcccacacctcccaaactctctcctggccagctctcgccacactcagtcaatgtccactgggggcctcaggggcacctccacctgcccaggtctgggaccaccgtcctccacgcatatctacagaccctgtcctcacctgcatcacaccaatgatggcgtcacagcgtgggttccggtcaccagtcggcctcccccaccaacgtggactccttacaagcagagccaccaacgtggacacgatcccatcaggaaccacctacttttgcatccccagcactgtgctcaggtcccagggaggccccagcaaactgtggaacaaccaaactcgtgactgaatgaacaagtatgttaagtcgttaagtaaaaatagcagaagacttagtagaatgtatgagtaacaattacaattatatgaaaatccgtatccacgtgaaggtattatgcaaaaaaagcttaactttgtttcagtgcctttccagttaaatgttgttaagcagtatttcccccaaaaggtgcatcttttataaaacaagaacgcaaggctctgaggccaactttgaacatttatttgagtgaattcacgtcccccaaattttccgtatcccaaaatctggacttttgctaaatggtgcccttagcacaggagtctctccaaggaagtggcctgagctgagagggggcctggcatcgcccacccaggtcatcagtcatcatcagcagcagctgcggcatgagagagatggtgtggggcgaaaccaatggggaaactacaaaagaaaccacctgctactgcaaacggcctcgctgtactcagggagtcggttccaggaccccatggacaccaaatccaggcacactcacgccccacaagtggacctgccgaacctgcgtgtacagagtcggccctccgacacacgtttcacatggcaggaacactgtattttctccctgagtttggttgaaaaaattcacatataagttgacccacaaagctcaagcttgtgtggtacaagagtcaactgtatgcaattgacactgattcctaccaacgatatccaaatcttagcatgagcagcacgataaacagaatgagcaaaattcaaaaactaaagcagcgtttttcctgcaagtgggcgcactgcgtatcccctgcgggaaagaccacgctggctgctgaccaaactccactggcatcttcctccatcctgagggcatcttcctcggcatcttcctccatcgacagcagcctgggctcacctcccagcccgaggctgagaactgagttccagtcccggggtggggtggcgggggggcgcactgtgcaccctcccagctctcctccaccccttccctcaggctggcccaagaatagcctggacaatcacctgctggggacaccgggctgcccctcctccgcccacagcctcaggccacctgtctcatccgtgaccgagaaacggagctgcagtgggaggcgggacatgctgggatctacccatggccaggccaagctgcgccaatcactcaagcttcactttgatcacttgctctaccaaataaaacagaacaaaataacaccatgtcctcctttccacacactcccaagcctcccatcccacttcccggtgctgaccccatgagaacactttgtgcgtctttctaggtattttctatcctcctcaagcacagaaccgcacgcagagtgatttttttttttttaaacagaaatggcaccagggcagatgatgattttttgtaccatttcttgactttcttgggcattttccacaccaggacagatggaccctgctctccttcctccccgcccacagctacctcgcagcagccacacactgagccataaaccctcgcaagactgtgggcatctcaaggtgccccacgtccccaaagaccaaggggtcacagctccacattgtccaacaacacttcagacgcggcctcgagcctggaagccctcctggccagcccagaccagccccagaacagaggtgtgaggggtgacgtctgtactgccttaaaaaaaaaaaaagcagatattcaatgccacatttaaaatggtcatggcagccaggcacagtggctcatgcctataatgccagcactttgggaggccaaggtgggcagatcacttgaggtcaggagtttgagaccagcctggccaacacagtgagaccccgtctctactaaaaatacaaaattagctgggcatggtggcgggtgcctgtaatcccagctactcgggaggctgagacacaagaactgcttgaaccctggaagtggaggttgcagtgagctgagatcacaccactgcactccagccggggtgacagagcgagactcttgtttcaaaaataaaaataaaaaataataacaaaaaacaacatatgcattcctagtcccttggagccacggcaacgaagctggcaatatattttgggtgtttaaaatcaatgctttacatgagctacgctgcaagtctcaaccttgatcctgctacagtaatcatccactacaaattaaaacaagagccataactgtctcctactaaaatattctaattgagacatactaacagaatacatttctttgggtgagaaagtctccaccagggtggggaacagacggcccaccaattgtgctgtggccctaacctccgaggactcagcaatcatccacagcaaggctggtgactcgaacactaaattgctctttgacattaattcttaaaccttgagaaaccaaagttctctttgtaacagacttgagaaagacactcagaagagacgcaccaactcttacctgggagagacacccttgctaatcatgtctggattaatggatgcactaaaagcatctcttccaactgggacacagactgcaaacaggaacaccacgaataccttccccaaattacccagtcctgacccatccacccctcaggaggtccccagccaagtccaataaggaaatgaccccacagcagatgcacgcacaggcagtgagggcagtggcgtcagggaattctgctccataaaccttggcagcacgcagggaggtgcatttctccttatcagacgctgccggagattggtagtgacgctttcattcttcacagctgctatctgatctcatgctaatcagtgtttttctgacaacaaagtcaaggtttctcagaagagactgccagatgaaagaatgggacaaaagacagaagcccgtttctgtacccagctggacaggtgaagtcatttaggtgcaggatgatctggccattccaaatatgcacggctttccaattttgttaaaatgaaacccagcctttgaaaaggcccggacttcctacaatgcacagtatttatagcgtggagggcactgtagagacgtcatcagtgtattcacaacagcaagatccacggaggctctgccatgtgccaggcatgagacaactgtttacagaaaacatctcatttcatcctacacagagtatacagactgcttcacagaacactaccaaagaggaccatcaaatgatccccaggaagtaatgagtgccttaaaagtaagaaagccaacctcctccccctcttatctccctgtcctcattttcatagaactaaagaaatatgaagggccagtaacgccccactgaagaacgctctcctggtggttatactctgtagtatggagcacaacactgccccatgctgcgcgaggctactattctatactacactactatgatcggtttgttctattctatactattccattctctacgatacaatattatactgtttcattctacactatataatactgtactatctgttctattctatactattttcttctatactgaaaggagttagccagcttgctttaggcagacagtaagcgaagggtcccagacagcctccagcccatgttttgtgcagataggggaacttgctcagggggcttgcctaaacatgctcacagtagactgagggtccccatacacatgggggaatggggtggagccaccagaaattcgctccttatgcaaacagggagcccagccccatcagcttctatgtaaaagcccttgtagtcaactgggaagggggcaaccagcaacctgctctcaggacccctctttttgctgagacctttccttttcgcttaataaattctactgcactcagtcttcgatgtccatgtgtctgtttcttcctggttgtgagacaagaacccggacccagctgagctaaagagcaaaaatcctgcagcagtgctacagaacactgtcctctctgttctgtgctatgcgactctactattccacactacgctatgtaatagtcactgccatctctgttctgtgctatgtgactctactattccacactacgctacgtaatactcactgtcctctctgttctgtgctatgcgactctgctattccacactatgctatgtaatagtcactgtcctctctgttctgtgctttgcgactctactactgcacaccatgctatgtaatattaataccatgctgtgtgttctaatctagactacattatgctatgcaatactacgttgttagttcaactgtatactctacaatactatcccacttgttctattctagactatgtaatactacttgtcctattgtatactatactatataatgttacactgtttcttctattctatgctaccctatagaacactctactatttgtcccattgtatactatactatataatgttacagtttcttctattctatgttaccctatagaacactctactatttgtcctattgtatactatactatatgttacactatttcttctgttctacgctaccctatataacgctatactatttgtcctattgtacactatactatataatgttacactgtttcttctatgctaccctatagaacactctatttgtcctattgtatactatatatataatgttacactgtttcatctattctatgctaccctatagaacactctatttgtcctattgtacactatactataagttacactgtttcttctattctatgttaccctatataacgctatactatttgtcctattgtacactatactatataatgttacactgttccttctatgctaccctatataacgctataccatttctcctattgtatactatactatatgttacactgtttcttctactctatgctaccttatcgaacactctactatttgttctattctgcactactctgtataattctatcctgtttgttccattctatacagtatcaggcatcgctttaccatgtcccactacataagagcagagccagttatactttcataatctcttttccaagctcttacccagtgcggtattcaaatgtgatgttttactatgccacacgtaagtgcacatttcatgataatcaatgccgtttcctatggttatagaattctgtctctatgattctatcaatacggcttctttgggcttttctgtaagtcctttgcagtgtctgatttcctagtgaaaagatgagtgaggtcccgataagatcctacgaaaccagcatccacacaggctcacctgtgtgcacactgctggactccgtgttgaaggagtgacaggaagacagacggctgtcggtgaatggaaggcaacaaggacagagtagattccagaactgagacaggtaccaaggctctggcacagctgagggtcgatcccaattctagcctctcacagaaaggcagaggtgacttagcacaaagagcatggaactttgctttaataaagcaaatgcttaacatccactgtgaggaactcaaggagaaatggcagtaggctctactaataactactgctttaaaaaatgcaagggagtgggtacattttcacatgggccatgtggaaagttggctggacctgccactggacctgacactggacatgctgctggacttgccactggacttgacactggacctgcccccggacctgccgctggacctgccactggacctgccactggacctgacgctggacctgatgctggacctctccctggacctgatgctggacctgccgctggacttgaccctggacctgcccctggacctgccgctggacctgatgctggacctgtccctggacctgcccctggacctgccactggacctgtccctggacctgcccctggacctgcccctggacctgtccctggacctgccgctggacctgccgctggacctgccactggacctgaccctggacctgcccctggacctgcccttggacctgtccctggacctgtccctggacctgacgctggacctgatgctggacctgtccctggacctgcccctggacctgccgctggacctgtccctggacctgacgctggacctgccgctagacctgtccctggacctcacactggacctgtccctggacctgcccctggacctgccgctggacctgccgctggacctgatgctggacctgatgctggacctgcccctggacctgcccctggacctgtccctggacctgccgctggacctgatgctggacctgacactggacctgcccctggacctgcccctggacctgccgctggacctgacactggacctgccactggacctgacgcttgacctgatgctggacctctccctggacctgatgctggacctgccgctggacttgaccctggacctgcccctggacctgccgctggacctgatgctggacctgtccctggacctgcccctggacctgccgctggacctgccactggacctgtccctggacctgcccctggacctgcccctggacctgtccctggacctgccgctggacctgccgctggacctgccactggacctgaccctggacctgcccctggacctgcccttggacctgtccctggacctgtccctggacctgacgctggacctgacactggacctgatgctggacctgtccctggacctgcccctggacctgccgctggacctgtccctggacctgacgctggacctgccgctggacctgtccctggacctcacactggacctgtccctggacctgcccctggacctgccgctggacctgccgctggacctgatgctggacctgatgctggacctgcccctggacctgcccctggacctgtccctggacctgccgctggacctgatgctggacctgacactggacctgcccctggacctgcccctggacctgccgctggacctgacactggacctgaccctggacctgccgctgggtctgctactggactgctaacaaatgctgcagacctttatggagagaaaagtacaatccatctgagagcagctgtcccagctctggatgaagccgacagaatgaggcagagctgctggcatcattcagtgggcagtcagtgaccctcctttaagtccagaaaagctcaaactgcatgtctgcaactagaaataccaatcattagccagacctcctggcaaatatcaccactgacccactgtaattctgtgtggtgtattatgtttcatgtgcaggaaatcattcacaaagcctttaacaaggaagtattaacatgacttttaatgcaatataacagctttgcacccatttaacatatatttaaccccaatggtatatgtaaatatatattttatagagcatcaggcgtgtttacctaatggctcaaacctttaaaatatctctctccctgagaggacagcggaggatcccatgcactctctccaggaacatggccctcccagagaggactcacaaatcaaatgtgcatatgcatgcatgcacagacacatatctcacacacacacatgcgcacacacacatacatgcaatacacacattcacacatgcacacacattcacataatcacattcataataccaacatgtaacacatacatgcacatacaacactcaaacacacatgcatatacatacatgttcatgcatatacattctggcacacacaaacatatgtaaatgcatacacataacatgcacacatatacatttataactatatacacaggagcatccacgcatgcatacttgcacatgtgtgcgatgtcatgcctaaacatgtaacacatgcacacacatacatacaacacaaatacacatgcacacatatacacatgcatgcatctgtacagtaccaagacacatacatgcacaacacatatacatgcaatacacactttcatacacataaatgcaaacacacatacatatatacacccctcaaagaccccattattcaattctatacaaaatggtttatcccccaaatgtaacttcttgtaattaataaactctactttactgcacatttcttgatttcaaataatgaggtctcacacacagcacacatacacacattcatactcaaatacatgtgaacatacgaatagaaataggcacacatgcctgaagaccctcttctgtaaaggtattctcaaacttgaattgaacgaattctgctaattatagtcagagtcagcaaagatatatatttgacctcggaatgaatatactcgttcttttcgttacccctggcaacagcaagaatgtaaaacagggttgtgtgatacgatgccacttattcaatcccacttcccgggatctgaccacttgtaaaagcgtttctgtctgagtgatttccttctgactaaaatcatgagataattccttcccttcctgctttctctttcccaggcctttttactaccctttcatcatctcggaaactaaatcatagttgtcaaaatggaaggcaaagaaacagccttaggagagaatctcacagtggaacggaccagagagaggaaaaaataatctttttgaaaatgtacaaaaggaaatgtcaagaggcctaggttccctctcatgacagaaacagacgtcagcagagcaggtcgctcagcccagttcagctctgtgtatgaaacagagattctagcccttgtccctgtttcaagctctgtgtatgaaacagagattctagcccttgtccctgtttcaagctctgtgtatgaaacagagattctagcccttgtccctgtttcaagttctgtgtatgaaacggagattctagcccttgtccctgtttcaagctctgtgtatgaaacagagattctagcccttgtccctgtttcaagctctgtgtatgaaacagagatcctagcccttgtccctgtttcaagttctgtgtatgaaacggagattctagcccttgtccctgtttcaagctctgtgtatgaaatggagattccagcccttgtccctgtttcaagctctgtgtatgaaacagattctagcccttgtccctgtttcaagctctgtgtatgaaacagattctagctcttgtccctgtttcatgatgttgcagtgaaggaaacgaaacagacaaagggcacagactggagaaaaggattttaaaaggatgacttttaaaatgtgcacctgcttttcaagggcacaatgaggactttttcaagcatattaaagctgatttataagagatgggtataaagactctacaaggtcattagactttaggcttacaaagaaaacaaataacattctcctagcatcaagagtcaggtgttccacaaatactaagaatagccaccgcaacgggatccactatgaggtgtcaaaacataacccatgaagcgtggccgagagctcctataacctgatttctaggaatctaattttaaacatcctcacagctagcacatcacaaaaatacagagctccaaatgccgtaacacaagtgctaacaacacctagccaaaaatatacgaggcatttcaggcaaaaatcccagaatcagaagaacacaagttttgtaagtccttcaaaagctggtgctggttgaggcttttctgcagacttcaacaaaagacacactagaattagccattgacagtaaccctgagtcaacacgcacagtgttgggaaaagcacaaggcctgctccaggcttgaggcccctgggatctttctctggaccgcaccgagtggatgactttgagaactcagaataaccaacaaccagtccctgaacagagagagaagactgcagcctccctggggacctggctccatgcctgccccctttcttccgtgtacctttgcccttcctggctccctcctccacctggagacgctctgggttgaggcccctcctcagctgtgtcttggtccacggctggctacccgtgtgaggctccaggcctcgaaggaccatctccacctgctccctgcgcttctcaccagcttccgccgtgacccccaggctctggctgctcccaggaatcagggccaccaggctcccctcgctgcctccagctggagtcccaccccctggttttcagcaacacttgggactttgtcctggaaactctcggctctgggctttagggaactgcaccgtgcagctcttctctggactctaagcagggccttttctgggtcttccgacccttcctccatttccaaatgtgggctttcctttggcctcctctctcccgacatgcacacctcacactctggctccttgacctgcacttctatgtaggaggctcccaaatccaccctggtccggattttccccaagcctccttccatatttccaaactcgcagcttgcggtggtgtctctaagtatctctgaatcaggtccacacttgcttctcctcctgatttccagcaaagcacaacgccgacctcagggtgtagactcacagcttcatctgccttcctgcactccctcttcccctcctgacccaggcactgaatcgctcagctcactggctgccttctctcctcctctcgccatggcgagtgccccgcaggagcctggcctgtcccccgtggctccacagcataccgcacatcaaaggcacgattctctccgaagccctcagtggcttcctagtatctgacaggtaaggacttccacattctgaccccaatctaactttctgccctcagataggcacatgcatattttatctatacacaaagagtacaggcctcacacctgctctcattcctgggttcctagctcctcctgaaggtactgtatgaggtacctatgcactttccaaacgctaagtgaatacgcacttggagaacacttgcttgataattttgtggcattgccagataacgcggacaaagtgagaactacgcaggtgtatggatgctgccttgcccagacctcactcacccagacactcctggatgttcaaggtgaccagccctattggcgcacaggcaggcacaggctgcacccccacagctgggccccgcgagctgaacgctaatcatgaagcagctgtgtttgctcctaaatctgtttatgccagtgtacttgttacacattacttaaaccaataaaatatgactccaaagagagagtaattgattggataaaaactaagatggatgcctttcaaagacttgatatgggggaatttttttttctttttcatctttttaaaattgttatcaaattaggtatgggcagaaaatatatacaatgtttgaggaaataatttttaaaggtttcaaatctaacttatcttatttctcttgtgttgcctattctcttttagaagaaccaaaactgtggcaggcctgcgatggctgtggttgaggaaagaggccacacccacagccagcagaaccacactcagcagcagcctagccccacgtggaagaggcgtgaacactctcgggagaggtggatgtacgctaatggttctcagctccgacctctgtgattaacagaacatgctgattggttttatctgaacgtcacacaaaagggtttctatgtccaggaaagactctaaacactctggaccctgctggggcagatggtgaccgtgacccagtgataccactctccagtgggcagcctggtctgcagagggggagatccctggggcagccctacctcagcatgggtgagtttctgttgcaattctatgtccagtgtaaataaactgtggaaaactgggagatggtacaagaaagcaaggatgccaactaaatgaatagaaagatctacaagggaaggctgagatcagctgaaataggattgggaaagtaaaggcctggctggaacttcgtaatggcttttgaggctcgggaacagggacagtagctgccctgtccatcccaggagagaacagacggacatggctggaaagcacttccctgactaaaagtgtctttaaaaagggagatctcagaatctccttccctggaatgctttaacccttcatggaacacagcagaaattccacagccctgcatcccaggaagcagggacaggacagcagcttccagcacacagaagcatttagaggcataagtagctacgcaaagacagcaggagccgtgcctcgaaaaggctgagatgtctgagaaataaagttgtacgcggatttacgcctgggcaggttgaaatgcgtgtgccatgacagatccggaagcttgtctactcgaaggtccacatccaggtatgtttcacagtcatcacaactagattttcagaaatttaaaactcctaatgaagaaacacaaacctgcacgtctcacgccaccacttaaggcagcggctctcaagcaggggcgattctactgggaggagggatgctgatggcaccagagggtgggaagcagggatctgacgcttagcaccgcaggtgccaaggacggcctcctccccacaagggctccgggaggccacaccagagggtgggaggcaggggtgacgctcagcactgcaggcaccgaggacagcctcctcccaggaggaaaaaacaaagacgggaaaaaacaaaggctccccacaagggctccagggggccacaccagagggtgggaggcaggggtgacactcagcaccgcaggcaccgaggacggcctcccacaaaggctcctctgggccagagcatccgtagtgccaaggggaaaagcccggacacaaaggatccagtgttttcaacgttgctcagggtatctccacacagaaactcccatctgccttttgtgcaaactctggggtcttgcaatcgataaacgttcacaagacacaacacgtgaacctaacaattctcttttgctccaggagagagaaaagaaggaatggtttggggagattcaccgaaattctgtgagttcttgactaaaaatcaccaagtccgctgtgttctgttatcagcagtcctgggtaggcccagacccacctcacccccagcgggacccaggaaaggctttaaacctcaaacgtcccttttcgtaacactggctgtttcatgtggttaataaatcatccaataaaatgacacacataagcccagttatacactcgacacattaacactattgatcattgttatatgtccgggttaatcaacattacaatgctacagagaaatcattggtactaagagttgtaaggatgattttttaaaatttatgtatctcaattttttatactgttactttttacattttaaaaaatgtatattctgaaatatttttgatattttaaaatgttaatgtatcaagcattttaaaatgaaccaaatatatatctacaaatatatagggaatttttaaataaatatcagggtagaaggaattaaaactcctaacttaatactaaatagacgggaaaaaacaaagtagagagttctcacagactcctgaaggaatatatagtaataaagctcaaaaagtacattaaaacctttataacgatgttttaattaccaactaacaagaaaatatctactgaatcgcgactagcagatacccaggtctgttcagcacctgtactctcccctaggtctgctgaggaacagatcaattctgttggagttgaccttgaaatttaaaaaaacaaaacaaaacaaaacaaaaacagctttaaagatttaaatttcctgaataaaacagaaaataaaaataacacttctgcacctgtgagttctcttgaccctaatttattttttgctttggatggttcataaaatatacatatataccttaaccgtgctttatattatatactagtgattgttaattcattattaacctcactctacagctaaattctaacactaatcatggtggcatcattaggacattgttctaggtggtgcttttttaactgaaaagaaaaacgggggataggtaataaataattatgtaatctaaagaaaaagttttaattgtgtgagtccagtaacgcgatcatctagcatggaaaatattttcagtagttccaggaaacttcacataagaaacactaaataaattctaagttcagtatatgagttagagacatttccaaaaggaaagcacacacagttggttgggagcgcctggattttctctagcaaaagactcgtggaatccatgctttcgccgccacgtgacgaggcacacgcggactgggacatcgtcctccaccctccagaaccaaacgctacgcgaaaccacagcgccagattcccacactggaaaatccctgagcaaagactcacgtgactcctcctcagccgctttcccaaaacaaaacacatcaatcaaacgaacccgatgaaatatacgagatcgaaaggaaaacaagagccaggcttatctcttacaggaacactccataaatcttacactgaattcactcatccttccacacaatctgctgataagaggtaaataatcaagtggaaatcactcaaagaagcgctttcctcccccaacagacgccgaagtctttgccgtggcacttatggggtgctctaacttctcagcgctggccgtcaccaacgcaggccggcagcaccctggaaaggcccaggtcccgcagctctccctccacgcgtggctacggtggaggaacgaagagcagctgtgagttcgtgggaaagaagggctatctggaataatacgagtccgggtgacatatgtaattgtgagtttttgttttctccgaactggccttattattattaattattccttcagcacctaccgggaaagcgagaagaaagcaaagggcatcactccctacccacgaaagactcacaacatccctggaaaagcaacgaggcgaacggctggtctgcgttcagagctggtgaggagcagggagaagaatccagagcgtccccgcctccctccctcaccgccctcccgcactgatgtgaacacgggagtaacaccgcgcgtggggaatccactggcacccagagcccggcccgcggcagcagaatcacccaagactgagatcctgtggcctgagtcggggccggggaaaccaagcctgcaggactccgggagcagccggtttctgcacacaggtaacatagaactgggggtaagcaaagccacgaggtcggcccgtggcctgtctgcccgtggcctgtctgcccgtggcctgtctgcccgtggcctgtctgcgcacagctattaaaagttcaataaacgtggtggcagcagctgaactggctaccacaggacgcagctggggtctggacgtgggcctgggggctggtggaaggcacgtgtgttgaggcgtgtactcagggcctgcctacttccccaggcctacggggacagatgtagctccccaggaaataccacaggcagaccccggccggcaagctgccccaagaagcagtgcgcctcccaaaatcagaagcagctaagctgacccccacctcatgtgaaagagccaggcaccagggagagggcacccacccagtctcctaatcataacagacattcacagcaacaccacgaaaaagaaactactgctctgacctggaaaaatgaaatttaaaacagaaaacacacaggttgtaactaaaaggcagacggaccaggtgcggtggttcatgcctgtaatcccaacaccttggaaggccgaggcaggcggatgacatgaggtcaggagttcaagaccagcctggccagcatggtgaaaccccatccctactaataatacaaaaactagccagacgtggtggcaggcacctgtaatcccagctactcaggactgggaggaggcgcaggatgacgacgagagagagacgagagaggcagatggcccacggcaggctgagcacaggacctggctgaggcctcctggggaggggcagaggcaaacatgctgctgcttctaggctactcgggaggacgcacgctcagaaggggctgcacggcaggacttgctgaggagcagtcacgtggatgcccccgcctctcacaacgcacacactgacaacatgcaactcacatacaacacaacatgcatgtacaatgtactcatacaacatatacaacactgacaacacacaacacacacaacacatgcaacctatacaacacatacccaatatatgctactcacaacacaatatgcatttataacacactcatacaacacatacccaatgcatgcaactcacaacacaacacgtacgtacaacacatacacacatacagcacacgtaacacatacaacacaacacacatgtacaatgcactcatacagcacacacaactcataacatgcacatacaacacacaacactcatacaaaacaacatacacaactcacaacatgcacatacaatgcactcatacaacacaacacatacaacatacatgcaactcacaacatacacatacaacacactcatacagcacatgtacaacacatgcaactcacattcaacacgacatacacgtaccacacacaacacacgcaactcacaacacaacatgcatgtacaacactcatacaacacaacactcatacaacatacagacaacacatgcaactcacaacacaacatacacatacaacacactcatacaacacacacaacacatgcaactcacgcacaacacaacatgcacaacacaacatacaacatatacaacacaacactcatacaacatatatgtgtattgcatacacataatacatgcaactcacaacacaacatacacatacaacacactcatacaacacatgcaactcacaacacaatatgcacgtacaacacactcatacaacatacaacatataacacatacaacatacaacacatgcaactcaacacaaatacatgtacaaggcactcacacaacacacaacactgatacaacatacaacacatggaactcacaaacacgtacagcacactcatacaacatacaacccatacaacatacaatacatgcaactcatacaacatacacatacaacactcatacaacacacattcatacaacacaacactcatacaacatacaaaacatacaactcacaaatacatgtacaacacactcatacaacacataacactcaaacatacaatgaatgcaactcaacacaacatgcacatacaacacacatacaacccatgccactcacatacaacacaacacgctcatacaacacattcatacaacacatactgtacagattctaagtatgaaatagaaaacagcacatgcacagtttctaaagtatgacaaaagcttttttcaagaaggtcatccaacatccaaactggtaacatgtcctcattttcagctgctgttcagattcaagcatgtttatcatctgctccatgaattacaataatatagcataaacccttttttcattttacacccactttggtgtggggtgctccaaaacaggggccaggagcctcagtcatccctcggaacaaaacacaactcacactcagaggccaggaagggaactcggggggcgacacacactctctcatctgcagagctctgcttcaattactttacatgtaaccgcggctggaacggggttggtgacggtacagacacggcaaactgaggagaaattggcaggtggagaaagatcagccagaatccaaggaaaaatgctgagcattttccacaaatagttcacacaacggacaatagttgggctactgaaagtttattgagaggggtcttgctccaaagaaaaagttctttcccaaggttatcaaagactcacagcagaccccggcccccaacacaccatctgcagagggcctgttagtcaaaaagaagacaagacagaagcaagggggtgcggggggaggagagcaagaggggaccgagaactcggaaccaagtgatgggcagacactgaatgcctgactccagggttatcgcctcagaaaacaagtccgtttaagcccgtggtaacagtgttagcgctttcactgaacctgcactcaacactggagaacctccctgcattatgaagatgagccgaaaaataacattaattcacaatgtagagtgatgattcagccacagaaaataaaactgatataatccactacaagtcacactgtgtctttctttaagactggtttatgatgcaggtaagaggcagcttgacatctaaaatacttaaactggcaaacaccttgtttccctgaattctcacaactgtggcaccagctagggtaagaccgagtggttttcagagcttccagaacagcagaacagatcaatcataaatatgcaaaagtgatctgaagacagaatattccacgtttcagcttaaactagtcatgtgatttccaataagtgggaaacattcataccaatgtttataagaaagttcaatgtaaacacacagtacagaacactatctttgttttggaatttattcatttaatatgacaatttccattgtttttagggattcctgatatcgaatgttcatctttattaatgatgagctacccattttctgactgaggaaacggaaagttgtcactgcctaacagcaatactcaaaacagcctgtatgaaaggaaaaggcatatctgtgcacacacacatgcatacacacacatccacacgtgtacatatgctcatacatgtacacgcatacacgtgtacacatatgcacgtgcgcacatgcatgaacatgtacacgtgtgtacatgtgtgcacatgtatgcacacatacgcacacgcatgcatgcacacgcatatgcacacacgtacatgcacatacacgcatgcatatacacacgtacacatgcacacacatacgcacatacatgcatatacacatgcacatgcgcacgcgtacatgcacatacatacacatacacacatgcacacacatgcatgtgtacacgcatacgtaagtatcatctcaggtacgtggattcaaaattctgatgcaaacaagaataatcacaaaacagggtagggtgtcaacaagtgagaattgagatggatgttctggaatgttccagagacaacatagggggacggctgcacatcacattaacatcttatccattttaaacgtgaccattcctgccaacatcggcctggattaagatgatttcatttacataaggaacagaaaatataatacttgttctaatgagattctctaatcattagattattttcacaattttaagtaatcactaaataacttcctttcaagggtctaaaaatataagataacaaaagaaagtcacagtcctgacagctttaccatgcaaatcacagctgtgaaaatgaagcatgtttttgagactatgtcttcctcaaatattcttcatggaattttgtaccagtaatggctggtaattaattgttataccaggtggaaaagtatatcattcagggtatatgaagtaaacatgtagagagaaatgaccacacacacctgaaaccaggtctcatttcaaaaccgtttcctaccttggatttgcttaatttacttcatgaggtgcctccaggagaggaagcagagctgggatctgccccgaggccgcttcaggaagagctgggtgggcaccaagcccctcagaccgagggctccgctacgtggctatgaccccatccctgcggctccccgagcgtgtgtccctgtgtgtcacgcaaacccctgccacacaggggacacatgccacacgcctgacacaggctcagcacacagcgatcagtaagtggtgactagagagaagcgacggcctccagcgtggacggagaaaacaggccacaggctcacagacagaggaaacaccacagatccacagacggaggaaacgccacagacgcacggacggaggaaacgccacagacgcacggacggaggaaacaggccacagacgcacggacggaggaaacgtcacagacgcacggacggaggaaacgtcacagacgcacggacggaggaaacagaccacaggcgcacggacggaggaaacgccacagacgcacggacggaggaaacaggccacagacgcacggacggaggaaacaggccacagacgcacggacggaggaaacgtcacagacgcacggacggaggaaacgtcacagacgcaccgacggaggaaacgccacagacgcacggacggaggaaacgtcacagacgcacggacggaggaaacgtcacagacgcaccgacggaggaaacgccacagacgcacggacggaggaaacgccacagacgcacggacggaggaaacgtcacagacgcacggacggaggaaacgccacagacgcacggacggaggaaacaggccacagacgcacggacggaggaaacgccacagacgcacggaaggaggaaacaggccacagacacacggaaggaggaaacaggccatagacacacggacggaggaaaagccacagacgcacggaaggaggaaacaggccacagacacacggaaggaggaaacaggccacagacacacggaaggaggaaacaggccatagacgcacggacggaggaaaagccacagacgcacggaaggaggaaacaggccacagacacacagacggaggaaacgccacagacgcacggacggagtaaacaggccacagacgcacggagggaggaaacgtcatagacacatggacggaggaaacaggccacagacgcatggacggaggaaacaccacagacacacggacgaaagaaacaccaccgacgcagggacggaagaaacaccacagatgcacggatggaggaaacgcgccacagaggcacgcacggagaaaacaggccacacacgcacgcatggagaaaacgccacagacccacggacgaaggaaacaggccagagacgcgcacacgccagtgtggaacatcggacaggaacgtcccggccatgcactgtccactcccactagggactccccgccccagagcacccaggatggctgtggagctcctgccgcccaccccagaggcgaggctggggagccagagatgagcaggttcacatccatcaaatgcggctgcaatccctgtaataactggaggtcaccattaaacagaagggcacttcacttcgaatgaaagcactctgcataaaagaactaaagattggctggcgaccgcttagaaaccatcacaatcattcttgtgagtgatggcgaagcttcaagagtggtcacttttcctgtagaaatgccacagaggtgattcctggaactcatttagaatatttcttttccagaaaccacacaaccaagaatttaatagtgccgtctcttgaccagaaacataaagatttctgatgaaactaaaccctgcccagcctcctgattctagaaggtgctatacagaaaagctaactcggaggggttgcatttcttttgtcatccatgacacacataaaaaaaaattacatgtacaaaaaatgtaggaattgtacagtgaatacccatgtatcaaccccctggatcacagattagattttaaatgtaaagttctaaaggttcccagctaaggaaatgtgcagtgtaagcctgtacctggttagaaccaagggggatggaatgagctttccccggccttgctgctcagctgggaggggctgccacagctcagccaccccaccccagagcacccaggatggctgtggagctcctgccgcccaccccagaggtgaggctggatccccaatcttggtgttaagagtgagccagcctttagaggccacgtggtctatacttgaatagaaaatgttccaggaaaccaaagattccaatgcctgcgatgaattcctaaccatttgaaacccagtctcctcatctgtacaaagagagcaatgctgtctcctgggaaagcatttcagaaggacgaaaaaggatccacatgagagcggctgaaaactaaaaggcaccctacaattataagattttttctatatctttgtttcaaggaatgtcagcattctaaatattgctcttcatcccacatcacctttcaggagcaaatcataacaatcaaaactatcagcagaatccccacccgctcagtcgccgtgtgctgcttctccctgcatgagaattcctgcagaagacggggccatccaagaatggctccctgccatcatgtgcccatactccttccccagggagctattcctgtactcatggggcatgggaaacctgtataacgccaccagaacgtccttgtttgacttacacacttcccagaagggctgattttatccagaatcctaactgtgtcaaacactaaacctaaccagtcatcaagaaaacaaggaaatgcaaggccgtctcctgccccaggtgcgtggctactaggggcgaaacagaaaatgaggcatgaaaggaaacttttaagatattgagaccatcactggaggattccaggaacccattacagatcattgctgttcctaataacaggaaatgaattctaaaatcccaacagggacggtgagtccctcacttgtatggaaatcaaaataataatccatcactatcttcaaagagacaaaagaaaaactctacttccttttcatattaatttgtgtacaagtaactaagtgagaaaatcttaatgtctggactgtgatatcagtagcaaaataaccccaagcaccccaattaaaagatatagactggctgagtggatttaaaaaaagaaaaaccaactctatgctgcctacaaaaaactcacttcagctgtaaagacacacatagactaaacatgaaggatggaaaaacatgtttcacattaatggaaatcaaaagtgagcaagagtagctatatttatttcagattaatcacaatttaagttaaaaactgtaaaaaggagacaaaaaggtaattatataatgataaggagatcaacacagcaagaggacataacaattacaaatatatgtgcacccaacaacaaagcacccagatatataaagcaaatattagtagatctaaatagagaggcggggtgcagtgcctcacacctgtaatcccagcactttggggggcagaggcaggtggatcacctgaggtcaggagttcaagaccagcctggccaacatggtaaagccctgtgtctactaaatagaaaaaattaaccgagcatggtggcacatgcctgcaatcccagctacttgggaggctgaggcaggagaatcacttgaacttgggaggtggaggttgcaatgagtcgagattgcaccactgcactccagcctaagcaacaaaagcaaaactccatctcaaatatatatatatatatatagagagagagagagagagagagagagagagagagagagagaccaacacaacaatagtaggggcttcaaaaccccactttcagcactggagatcatctagacagaaaataacaacaaaatatcgaatttaaagtacagtatagaccaaatggacctaacagacatttacagaacatttcatccaacagatacaaaatgcacattcttctcctcagcacatggaacattctctagaatcaatcacatgctaggctacaaaataagtctcaatacatttttttaaaattgaaatcacatctaggatattctcagactgtaacagaataaagctataaatcaacaacaagaactttcaaaactgtataaatacatagaaattaaacaatatgcccttgaatagccagtgggtcaatgaagaaattaagaaggaaatttaaaaatttattgaaacaaatgaaaacagaaacacaacatatcacagcctacggtatagagcaaaagcagtattaagaggaaagtttatagcaataaactcctacattaaaaaaaagatttaaaataaacaacctaacaatgaactgcaatgagctagaagagcaagaacaaatcaaatccaaaagtggtaggagaaaagaaataacaaagatcaaagaggaactaaataaaattaaactaaaaaatacaaaagatgggaaaaaatgttggttttttgaaaagataaataaaatagacaaaccattagctacactaagaaaaaaaaagaaatcccaaataagtaaaattagaaacagaaaaagagaattacaattgataccacagaaatacaagggctcactggagactattatgaacaactatatgtcaacagagtggaaaacctagaggaaatcgatagattcctggacgtgtacaacctaccaagacggaaccaagaagaaacggaaatcctaaacagaccaataatgagtaacatgtatgactaagtaataataaaaagtctcccaacaaagaaaacctcaggactaggtggcttcacagctgaattctacaaatttttatttcaattcttctcaaactattccaaaaatattgaagaggatggaattctgccaagttcattcttcaaggccagcattaccctgataccaaagtaagacaaggacacaataaaaagagaaaactataggtcaatatccctgatgaacacagatgcaaaaatcctcaacgaaatactaacaaactgaatccaacagcaaatcaaaaatattatacaccacgatcaagtgggatttctcccaggatgcaaggatggctcaacaaacacaaaccaataaacacgctacatcacatcaacagaattaaggacaaaagccataggatcatttcaatagatacagaaaaagcatttgataaaattcagcgctgcttcatgataaaaactctcaacaaactaggcactgaaggaaacatacctcaacacaataaaggccatatgtgacaaacccacagctaacataatactgaacggggaaacactaagctttttctctgagatctgtagcaagacaaggacgcccacttgtaccactcctattcaacacagtactgaaagtcctagtcaagagcaatcaggcaagagaaagaaatcaagggcacccaaagtggaaaggaggagctctaattgtctgttttcagacaatatgctcttatatattaaaaaaaaaaaagactccagcaaaaatctctttgaactgataaacaaattcagtaaacttacagaatacaaaatgaacatataaaaatcagtagcatttctatagaccaacaatgagccagtggaaaaagaaatcaagaaagcaatcccatttagctacaaaaatataaaataaaaataaaaatacctcagaagaaatctaaccaagagggttaaagatctctatgaggaaaataatattctaccctctgagggtagaatagtggattctagagacaggaaagggtggcgggaagggagaaagggagaggttaactaatggatacaaaattacatctagataggaaaaatgaggtttagtgttctatagccttgtagggtgactatagtttacaacttattgtatattttcaagcagctagaagagaggattttgaagattcccaccattaagaaataacaaatgtttgagatgatggacatgctaattaccctgacttgctaattacacatgacaaacatgtattgaaatatcacgctgtatcccatagatatgtactataatgtgtccattaaaaagaataattgttaaaaacccaagtgctatttctcatttgtcctatgtcaatgttgtggtccattggtggagacctaaccacttgcaaggaagactatagtcacttgagctgaaagcaaatgaatcaccacaaaaactaccactggcaccaagtcttgtttccagaatttcctgcccacagcactgccacagtcactgtgggcaggaaagacacactagccaccaagtttcaaccccagcacaattgaagcctttatttctctggtttggaataggtgtgtgttcataacttacatttactccaactgcccccttgcttaaatagctccttaaggatgacttcctgttactaaatcccaacagcttctgagtatccattatattctccaaagtaaataaaaagagaaaatgtgttgaaagcctgataatgttcacttaagaatccagcatgatgtactgcttgaaacggacactccaccttgttcctttatgttacttttaaagtagtcccagttattatacatagttgaagccataatttctgcaataccattaggtccacaaagggtggggccagggaacttcaaagtctgtctctgatttttttatttaaaaaggaaagcttatgagagtaggtaatgaaaataaatattcacacaactcggaacaggggatggtgaaacataaagccccagcctggccaggtgtccagccagtgagggtggagacccagactcatacagtccccacaatcccccagaagtgccacagacaggtgggtggcctgagacagagccaggctccgaattccaggagctgtctggctcatgtgcacccggcgtggtccagtgcatgaggatgccccacgtcaccagtcccagtgcagagcacaagaatgcccatgtcatgagcccccgctgcagagcatagcccgaaggtgccagcccagcctcctgcacacactggccaccaaggcactgccctccaggaaggaggacctcagaggtcgtggcagggtgaggtcctgctcttcatcatccccgagcagtggggaaagtcccagcagacatttggggagtccctacaggtggctctggaactctgagtggaagtttaaagatgtccccagatacaccagactcaaacctaaaacaggccattcttccagatatgcccagactggaacctatataggccatccttcccagctttcctctggaaaagcaggcttaaaagagtatcgactaaaaggggccaccaggaagagagaagtcctatctttaaaaaaagaaagaattttttaaaaaagaggcactgaggctctgacccatctgagcacagagtacgtgttcggcagcatctgtcagagcagaggaagcacacacgcactctccataccctgtgctcccagcacccgtcctccccgcacccaagctccccacacccgtgctccccgcgcccatctctgctccccatgcccatgctccccacgcccgtcctccctgcagccatgctccccacactcgtgatccccgtgcccatctctgctccccatgtccatgctccccgcacctgtcctccctgtgcccagctccccacgcccatgctccccacacccgttctccccacgcccatgctccccacacccgtgctccccgcgcccatctctgctccccatgtccatgctccccgcacctgtcctccctgcgcccatgctccccacgcccatgctccccgcgcccatgctccccacacccgtgctccccgcacccatctctgctccccacgcccatgctccccgcacccatcctccccccacccatgctccccgcgcccatgctccccgcacccatgctccccacacccgtcctccccgcgcccatgctcctcacacccgtgctccccgcgcccatctctgctccccatgtccatgctccccgcacctgtcctccccgcgcccatgctccccacacccgtcctccccgcgcccatgctccccacacccgtgctccccgcacccatctctgctccccacgcccatgctccccgcacccatcctccctgcgcccatgctccccgcatccgtcctccccgcgcccatgctccccacacccaggctccccgcgcccatctctactccccacacccaggctccccgcgcccgtcctccccacacccctgctccccgcacccgtgctccctgtgcccatctctgctccccacgcccaggctccccgcacccatcctccctgcgcccatgctccccacacccatcctcttcgcgcccatgctccccgcatccgtcctccccgcgcccatgctccccacacccaggctccccgcgcccatctgtactccccacacccaggctccctgcacccgtcctccccacacccctgctccccacacccctgctccccacacccgtgctccccacgcccatgctccccacgcccatgctccccgcacccatcctccccgcacccatcctccccccacccatgctccccacacctgtgctccctgcacccatctgtgctccctatgcccatgctccccacacccgtgctccccgcactcgtcctccccatacccatgctccccacacatatctgtgctccccatgcccatgctccctgcatccgtcctccccacgcccatctgtgctccccatgcccatgatccccgcacccgtgctccccgcactgcgttccctgcgcccatatctgctcctcgagctcccttccacagatttcctctgtacgcccttcttgatagtcactgtcacctggaatcgcctggataaatggaggtaaagaaaataaatggaggaccacattggaggacagagtggaagcggctatttaccaagcagggctgtgagatgagcgcatctgatccacattaatcctgacagtcggtttattagccccattcaacagctggggacactgaggtggggagggatgggcttgcttaccctggacgatgctgacagtgtgggcccagcccggtcccacagccaccaggaggaggctcctgagcaggcaggcacagaagtgcagcccagagaacgcttgggaccctggcacagactcctcaggaaggaagcagagaaaggcccacagagactcaagcagcacagaagaaggtcacccacaagttaaaaatagatgtttgtgctttaccgtcccagcatgctaaaaatccaacccgctcacacgcacggcctgacatgagcccggcctcctgcagcactgggccaagcgagagatgcacctgcccctctcccaacaatggcaggctcggcagctgctcttcaatgtacttgacacccttccatgaggattaagctacactgtccgcactgggtaattttaatcctgacacagctaaccgtgtggatctgcagcacaacaaacaacctgcttaggatgattctatcactgacaaagacgctgaatctcccagcaaagcccagtgacgtttctgttttcatttcaggtaaactggcccacacggtctagtttacctgctgataattccttggaaagaccatcaggggagatccacaccattttcagctttacagggatgtgaatttccatgcgatgagaaagggaatggggaaataaaacaaggattcaaaacagattgttctgaattgttttgcctgtgtgcttcctgggagtggtaaagtcaagaactgccgctctgtgtcaggcgagggagtaatagagacaatggcaccaactcctgagacagaggacctgacacatggtgcagccaccgcctgtggccacggaaattccagggaatgcagaccccagttgcctggtgcagccaccgcctgtggccacggaaattccagggaatgcagaccccagttgcatggtgcagccaccgcctgcggccacggaaattccaaggaatgcaggccccagttgcatggtacagctaccgcctgtggccacggaaattccagggaatgcaggccccagttgcatggtacagccaccatctatggccacagaaattccgaggaatgcagaccctcagtcccatggtgcagccaccacctgtggccacagaaattccagggaatgcagcccctcagctacatggtacagccaccatctatggccacggatattgggaaacacagaccgcagtcacatggtgcagccaccacctatggccatggaaattccagggaacacagaccctcagtcacatggtatggccaccgcctgtggccacagaaattccagggaatgcagaccctcagtcacatggtacagccaccatctatggccacagaaattccgaggaatgcagaccctcagtcacatggtgcagccaccatctatggccacagaaattccagggaacatagaccccagtcccatggtgcagccaccacctgcggccacagaaattccagggaatgcagcccctcagttacatggtacagccaccacctatggccacggaaattccagggaacacagacccttagtcacatggtacagccaccatctatggccacggaaattccagggaacacagaccctcagtcacatggtacagccaccatctacggccacggaaattccagggaatgcagaccccagtctctaaagtgttatttgttttatgaacttcactgcagtgattgtggaagagtttctctctgtgcagagctcagcatccagaagggaagttggccccaggaacgccttcctcctcttcagagctcagggcccagggctaaggcccttgggagaggtccctgttcggcaactgtgcctgtggagggccccccaacactcaccgtgtatctcctaggagcagaggctgcaacagggacccagagaccaagcctctgctcaggcaacagtgagctgatggccttccactctaagttccaactgcatggagtgtgtattccatgaatgcttgttaaatgaatgattcacataataaggtcttctgtgctgacctttgctggtctgctgaccatgggcttcagagcatagacctcattcctggagcaaccagctcttcccagagcaacggccgctggaggacaaaggccagggcttcttcctgcagcaacgcactcaggaccctgcgctgggcacactggggcctctccagcagaagatccccagccctgaccttgcaacaccagtgaaccccaggggagccccaagtgctcaaaatcaagtaaatgtccattgtgatttaacataccaattttagaagaaagggcagattgccacctccctcctcaaactagggaccataaatcgatacaaggccttaactgaggctctgccttaaatcctgctaaaactaccagccaaacacccaaatttacattaaagttaaaggaaaaaaaaaaactaaaccaaacacctgtaagaaatggtcaagtaaactgtgatacatcaacccaaagattaaacattaaaacgatgaagtagcaagatattaaaagaatacaaactctatgtacgtcatggctcaagggttctaaaattacacagagacaaagactggaatggaagggggatatgtttacagatacattttttattttttaatttttaatggtatattacttctctaatatatgatttgactaaccagataattcagcaaaaaaaaaaaatcaatcgtgcctatagataaatatgtaaagaatccctctctctgatgccaatggaattagtttgggtccggcccacagtcttcaatctttgaattaagacacaaaaaccatcttccaagctattagcgaaacaaaaaatgatttaaaaccaggagcccaaaagaaaagacctaccatcagtcacagcatctctccacgcctctctaccctggacagtgttccttctttccccattttcatacctactgcacaaagcacttagtaaaaagttatctcaattcatgagtcgcgcagcacaaagggccgatgtcactaccaacataccccgcagcccaaaaccgaagcagcaacccccagcgaagggaaaatgagaggctgctggttgtaattgtaaatctcacaactcaatgtcttagcactttcctgccttgttgctttcaagggcttattaaaattaactcccctactggatattgaagaaagaaggcaggacggttgtgcaggctccgaagaggcggagccctcgttccgcagccaccgctgtctttctacccacagcagccgggtttaccaattagtctcccttaaagggcactgtttatgatcatcaccaacaaatggatgcaattacttcttttgagatgtagcaagtttttggcacaatagtcataaaccctgcatggcacacacacagaaggaagattaaagccctggaggtggaggcgttcgggaagggaaggtggaagcaggaaggacacccacaagatagagtggtcagaaaccgaccacgtcaccaaagggcgccatagacgttccagaggacaaaatgcccgtctttccagggtaaacacccatttgccaaacagccagtgacggcaagcaggagtttgcttttttaaaggcgtctgagtaacgatgagaagagcaagaaatgagcttaataatgggactgacggggccctgggctggtgactcagccaatgtgcacagcatcaaaacccaggttcctcagtgcgctccctctgcagttcaggagagcgctacaactcaccccataaatcactgattaaaaaaaatcagttctaaaaaaagagacgacccatttgaaagcagctgggaggaggaagacagtgactcacagaatccaaccgcttgtagcctcggaaccataacaagaatatgaaactagcaagtccagtgtgaggcagaacagagacgccgtcatggctctcaggaggctgagcgggaagcgcgtggctcgggcccctaacggcacctggagcagcctatgggcctgtgcccttcatgtgggttcgctttcctagcttcctggctaaatttgatgtatagcatttattcgccaagaaaagaacattcaaatcaaactattgtcataactctgaaggactcttaacattccagtccacacgttcaaaagcccacacatatcagtgctgccactgtgcaggtcacaatgttttcaatgcatcttgcacgcaaccagtaatgatgttttcaatgcatcatgcaggtagccatctcattcaggatacttaaatatctgtgacgacttgatacttagttatctgtgactttcagatagatgtaacaacgctacctggccaagaagtcctcaccctcctgaacccactgaccctcctaccctcctctcagttacaacaaactgtccgtgaggctcaatgaagctcagctttcccacgtttgttttttcagagtaaactatttcttttcaatgaaaataatgtgtacagagtcctcaggaccttctcttaggctctggaaggtggtcccctggtcagctcttacacaggcgtgtgacttcctcactgtgcagggtggaacctccaagaaatgcacagggctgggggtgccgagggcagaactccattccaaagccacaaatatctgtgaccttgtgccaagtgtcctgaaaaagccacccccaaaacctacaaacctcccactgggccatcattttaggatcccctctttggcgacagcaacgtgcaggctgtgtgaagaccatgtctctgtacttgacacgtattcatatgtgctaacagtaacacacacagccaggcacggtggctcacgcctgtaatcccaacactttgggaggctgaggcagggggatcacctgaggtcaggagttcgagaccagcctggccaacatggtgaaaccccatctctactaaaaatacaaaaaattagccgggtgtggtggcgggcacctgtagtcccagctacttgagaggctgaggcaggagaatcacttgaacccaggaggcgaaggttgcaattagccgagattgcaccactgcaccccagcctgggcaacaagagtgaaacttggtccccaaaaaaaaaaaaaaaaaaaaaaaaaaatatatatatatatatatatatatacatatatatatatatatatataaacacacgcacacaggtccctcaaccaacacaggaagacctggcacgtgcgcgagccttcacctccctctgcaagcaggttctcccctgctgaaaaaacattaggctgcactactgtggagcataactgctcgctgaaggaatcggctacattaactagcagagcagagcatggaggatggagtcagtgggcatggaacacgctgacaattaccaaagccacagagtacaaagcatggcacctatttttcaaaacttctcttccaccaaaaaccaacaatttttgcaggctatattatgagttctatcaaaataattcagcacctcctaaacaaatgggaaagagctccttctgaagcatgcactgcccaaaaagatcagtgaccagtcaacagagaaacttacttcctaatttgaatcaacagctaaatgcaatcttttttaaaataataataataataataagacatgagtctgggcacagtggctcatgcctgtaatcccagcactttgggaggtcgaggcgggcggatcacctgaggtaaagagttcgagaccagcctagccaacatgatgaaaccccatctctacaaaggtacaaaaattagccaggtattgtggcgggcacctgtaatcccagctactcaagaagctgaggcatgagaaccacttgaactcaggaggcggaggttgcagtgagttgagctcataccactgcactccagcatgggagacagagtgagaccgtctcaaaaattaaaaaataaataagacatgagtttgtctttatggggaagttttctgcttccactccaatttgtttggcaattccatgtaaagtatcagttattaatgaaattatttttaggccctttaaagccacaaaaaagaatacccaattataaagggcaaaaatgtagggaagagaagggagaagaaaatattctggggaaaggagtatgagaaagcagccgccacagccctctcattccttgaccctccccagaatggagctccagatcacctggaggcctccccaccctcatggcctcctcacctgcagggcctcctcagccacagggcctccgcaccctcacggcctctccacctgcggggcctctccactagcacagccttccccccacgtggtctccccacctgcacagcctcctcacccgaggggcctccgcaccctcatggcctccccacctgcacagcctccgcacccacacagcctccccacccgcacaacctccccacccacacagcctcctgaccgtgtggcctccttacctgcatggcctcctccctggctcacactcagacccaagtatgtgaggagatgacccccctggccacacaacctgaatgtatccccacatggattcgaggccatcagctcccacaagagggctgcccagcacttctccccacagagagcccttgtgttttgctggccgcatgctctgtggtgtgagctggcctcaccttcccctgtgagggggcacagggcacgggacagggacaggcagtggaagaaggatggagccctcggccccgcagcaggaagtgcccctgcagccctgcaaagcaggacaccagcagtgcatgtaatggcgcccagcaggcgggcacagcagaactggaccagggtctagaaacccacacaatgcgtaacccacgcaggctggcagcccacacaggaacctcaggggaatgctctactctttccttcagtctatgttatgtgcttaaaacggaactttttccatcctcctctgtaggaaatgagcactggaaattccacatatgtttctataatattttctgatattttaataaaatgatgacaaccaacttaaagaattctctccacttgaattttgattgaagatgggaaataattcagcattaacagctgttttcagctttcactctgaaagcagatacattgaggaatttttgaagtccaataacataaagaaacacagaattttgatccttcaattcttggatttctattaagcaatactggaaaacaagttgattcatctaatttaagcctgtaaaactgttttatgtggttatgagacagagaattccaaatgaccttacagcactacccccataaactcaacctgggcaaacccacacttcacagcaaagttaaagaccatccagcaaacagatgaggcagtggggccagcacaggccggagggtgcagagaggctgaatagagccacggagcaaccctctcaccctttcttcttaaatgtgtagctcagatctcagcaagattcatgtggaaggaaaaatataattaggcttcctgcatgcaaacacacacacccctttctctgcctggtctctcaataagaaactaactcattaagccctttttaaaaaacctgtacagacgcaaggtgttcacagggaattcggctgagcacaccttcgtcgaaagtggctttgccatcatctgggcagcaagacagtatcactcaccctccaagagcaactgacaggcaagtgtcgtcacctcaaaaggccacaatgcccaacacaggacacccattcccatagacatcccagactctgggaacaaatgtgggtccaacttctgggctagcagtgggtgggggaaccctcagatggggctcgccctgctgagctcaggggcgctacgctctgctgacctggatggggcactgacacttcacatcagtgtgatgcaggcagcacagaagcccctgtcctgagacagcgaacacggagggtgctgcaggcaggggtgcacctgggccgagacgcaagccgggaaacctacccaaggctgacacaatcagataaccagggtgggccttttgcaaatgatacactccttacccaccaaacgagctgtctgcactgcacaatctacttaccagtttacatccgaaccctgcacacggcagctcccgcctcctagccatgccctcctcatcctcagctcctcaggagggcagcagccaagcccacaggcctggaagactctgccccccgccaactgtgtcacgttacaggacactgacacacctcgcggaaccccacatctgaaactgaaaaacagtaccatttcccgtccccagaagtctggaaaggcagttggctgcacaccatggcccctgctcactcccttctttgccctgaaagtgttaaaaaggaaaacataaagtcaacaccagctcctccctgccggtgaaaattggcacgaatgagtttactttctggctgccggccctcacaaaaccgttacccaaaaaaagttcaccatgctaaactgctccaaatataaatgtgagacgcgccggcccacccccaccccaccccacgttacaggaatggcctgaccaggatgagcccagagacggctaaatgcacatcaaacatttcagatttgggaacttcagtggttttggggaaaagacctggcaaagcccgatctgaaacttatgacagttgagcacatgatctccgccatgaagagcaaataagaggcgtacacaaccctccataagaccgcggtggctgatctgccacaaaccctcctacgagaggaccaggacggcaaggccggagcccggcccggggggaggttgacgattccgcccagccctccccgcgcagcgcccgcgaacaatgggggtgggatcccccgggccgcgccaggaccgctgcacggcctgagccaccagagatcgaacccggggtccaacgacaagtttcgcattgaaatctggccgggcgttccaggccgaacccgccagcgaggaggtggcgcgcaccgcgctgctgcaccaaggacgccgcggctccagcgcagagcgcacgggaaggccgatcccgccgggcccgctgcatcctgcgtccccgcgcggcgcccaggccccacagacacccccagggcgcggggggatcgcggccccacaaacatcccagggcgcgggggatcgcggccccacaaacacccccagagcgcgaggggatcccaggccccacagacacccccagggcgcggggaatcgcggccccacaaacgtccccagagcgcgggggatcgcggcctcacaaacgtccctagggcgcggggtctgggggtccgggggacgcgcacgctccgggctggggtcgcacctccccctccgggcccggcccccgccccgccgcaggccccgcgcccccagccctccgcgcgcggccctccccggtgacagcgcggcccggcccggggcgggggcccggttaccttccgacagctccagctccagctcggccaggcgcgcccgcacctccaggggcagcgccatgccctccaggctgcggtccgccatgctccgcgggcgccgcgccccgcacggcctcctctttgttcgcaggcggaggtctcggcggctcctcgcgcccggcggaaccgcaccgaggaggaggcggcggcgcgggcgcgggaggcgggcggcgggcgcgcagggacctccctcccctcggcgcctcctcagcgcggccccgccacggccgcctcgcgcgcccccgcgccccacggtccccggcccgccccgcgcgcgctcggcccctccccgcaggcgctgcggacccggacccggccctgctgctctcggccccggcccggcgggagcgtctctgcgcgcgcgcgtcacggggccgcgggggcagggcgcgcgcgcgcggggcgcgaggacgcgcaggagcgggagcgcgcgggggggcgcgcggccgcgtcggcgaagcgcgcgctcccgggggcgcgctcgggggcgggttgggggctcggggcccgcggggcggggcggggcggggcggtcttgtctgtcctgggctctgcgcgtccagcggagcctgcgggcccggccccagagcctggtccacccggctccctgcgaaaatcacgtcctggagccgcagcttgacgtctgcgcgaaaactcgcagtgccccgggtcttggagggctggttttttgttaatgaacattttaagaggcggagacggagcgctaggctggaagtttcgaatgcaacgaccagcagatgaccttgagcgactctgagcctttgcctggagggtcagtgtccccatctgtgaaaaggggatgggaagacaaggttgggtcacctaatctccaaatgccaggtgggcccgaaaagcctggctccagccctcccggaacaggctgcaggccccagggttcccaccgtccttctccttgtggggccatcagctcccagcctcagtgccacctcggcgaggctgaagccccgtctgtgcctctagtcctgaccatctggggaggccctcgcatctccaaccgtccactgagcaaacttccctggaagcccctagacaccccaaacgccacaaaccctaaatgaagccagctgcttccagtgactcttagtcactggaagttctgcttctcagaaccgcccccgttgtcttcatcatcaccttcctctgtctccacacatcctccccagtctgttgcacaaagccccgacgacctggcctccttttcatccttgtaccccctcttcccagcccggcccctcccttaggcccagagcttcctaaagacctcctcgcctccccgtcctccacgggacattggccagcgctggctcccggaggcccagctgcactcactcccctttcagagtgggccgcaggaacacaggtcccccacctcacccccctacccctaccccccaccacccccccaccccgcttcgaccggagcccccaccagccgggacccacctgcacggcagccttgcggcctccacactccggctcctgcaaacaacgcggctgacccgcagcacctctgctcccggcctccaccccggagagcctgccccttctctgcccctgccacccacagccatccctgaccccaggtccagaacaa

SEQ ID NO: 154 - DNA, 417458 bp, Homo sapiens
  source 1..417458: mol_type = genomic DNA
acaagaacagaaaaccaaacactgcatgttctcacttataagtgggagataaatgatgagaacacatggacgcatagaggggaacagcacacactggtgccttttggagggcggagggtaggagaagggcgaggatcaagaaaaacaactaatgagcactaggcttaatacctgggtgacaaaatactctgtacaacaaacacccatgacacaagtttacctatgtaacaaactgaacttaaaagttaaaaaaaaaaaagaggttcttattatgttgcccaggctgatctcaaacttctggactcaagtgaacttccaccttggcctcccaaagtgcctggccttagatattcatacatttatttatttttagagatgtggtgggggtgtggggggtctctctctgtcacctgggctggagtgcagtggccccatcatagctcactgaagccttgaactcctggactcaagcaatcctcccacctaagcctgccgagtagctgggactacaggagtgcactaccatgccgggcaaacacactgattttaagtacaactgtgtgctttcagtcttaagatcttcagcttttgaaggacctcagccttcctctagttctaactcctctcgttctaaggagatccttcccattcctgcagaacgtctccccaacccttcttcttcacagttctccctcctatccctgaaccattgcaagaggttttgtgccaagcctctggcacatggcacattctatctcatgttgtgatttcgttttctatgcacgtgctctccttctagcctggaggtgagctgcttaagggcaaagagctcatgtgtagcccttccttgtacccattgtcctatagcaggtgctacctagggggtgctccagtagcttccttgaatgaaccaaagagaaggggtgaaggggggagtcagttgcctaggagcttgcatggacttctgtgtcctggaaccagcccggagctgctggaagatgctagaagttggaatcctatctcatttctaaacatctgctcccactcatctctttccagggtcatcagttatccccactcctcccccccgcccccactttgtataaatgagcccctcacatccctccatcttctccatcactgtgtggtcacttcttaaatcatgcgtctggaaggcgccctcctgtaccccatcctggaggcttcctgcacttcccctcttgtttcttccagaaatgagtcagagtgaaagcaaactttctgaggtcctgagatcccggagacaggctgtgagggccgctggccccgcccgctccagcagcgtgtgtgtgtatgtctgtgtgtgtgtgtgtgcgcgcgcgcgcgcgcgtcaggggccaatgctggaaaggaaacagcggactcgctgaggagaagaaaggagccgcccccttcgtcgccagccccctccccacttcccgtccagcgcgctgctcccttccccccgcctctggcctcggggaaggagcaggaggcagcccaggcggagcgggaggagctggcagcggggcgcatgccaggcgggggtcctcagggcgccccagccgccgccggcggcggcggcgtgagccaccgcgcaggtaggggagctgccacagagtcctagcacgtcctgggggggtcctggcaaggagggcgcgctctggcccccaggaagtcgcgtaggtcagggcgtgcctctgttaacaacccctttcgaggtgagggaaactgaggcaggacgcgaggcgtgcgaggttgagagaagagcgagtcttgggctgccagcccggcaccagcgccgagccgggccaggtccctgacccaggactgtgcagcgatccccgggacccgcagtttgcgaaactgtaggagtctgacccgcgcccccgctgcgtgtccaggtgaccgggaaaggttgcagaggcgtgcttggggtttggatccgtccccgtcctgggacacctgcgccgcctgcactctcgttgcggtgcgccccagcctgcgccccctcgggacaggggacgtcccgcccgccttaaccccaagacccagctggatctcgggttccaccccttcggggacctggagggaggaggctgggagcgggaccaggaactggtgcctgtgccttccctaggggctgctctgaaatcagtgtcaccgcccacttcctacttggctacagtaacggggatggcccaagccggagactgctcggtttccaccgcctggagcgcgggtctcgctgtcaactcttagtgatgattgtggatggttgtttttcaacaatgacaggacttctaccttctcactcttaaaatgtgaggttttccaaagacagtgagatttggagttagggagtgctgccttgtgttcttgctgggtgaggacagggctgggtcagtcgcttaacctctcagagcctcagtctcctgaaatgtaaaggagaacactcatagcctggcctccatgtgtcgttaggtttgttgtatgggaaatcaatttgcaaagtgttatcatcaactggacaaatttgaattggacagcactaggaccataggaactggggtttggagacagtctgcctgcatgtcaatcctggacatgcaggagactatgacagtacctgcttcatagggttgttatgcggtttaactgtgatggtggaagtgaagcacctcgcccaatgcctgaaatacccagtgcactctcaaaaaaccttagttgctatttttcctaggcaaaatctaaataattgggagtaatgtgagaataccagtttgatttgattaatgcaggaatagtagggcatttaaaaacacatgtagttctcctgtgctcggcatggtacatgaagtcctctgaggttcagttctgtgccacagagcaaaaagaaccgtggacaagatacccgcttttcgggctctttgactttgagcctgttttctcatctgtttacaaaaaagataaaagaaaaatgggggtagtaattactgccttttgtactgatcgcattgcctgaggattaaatgaggcaaaagatctgaaagcaccttgtggagtatgagtcactatgcacatataagacatgatagtactaggagggaatggtaacatctgcaggtttttagaacttacaatgtgccagacattttattatgaattcctttgatgaaatcctccctgcatctttatgggactgggattacagtcctcatttccctatgacaaagctgaggttcagggtcaccctgcttggttcccaagctcacagagctcttaagtgtaaagccaggattagaaccctggtgtgggtgccactcacaactgtgttcttggccgcttgccaaactgaacttatagagtggagctgtgattcagaacagacctatattagaatttaggtaatttttttttctttaggagacagagtcttgctctgtcacccaggatggagtgcagtggcacaatcatggctcactgtagccttgaactcctgggctcaagagatcctcctgttccagctttttgagtagttgggattacaggcgcatgccaccatgcccagctaatttttttttttagagttggagtcttgctatgttgctcaggctggtctcgacctcctggcttcaatcattcctcccactttggcctcccaaagcgctaggattacaggcatgagccaccaggcccaacctccatcctgcatatctatagacccaaaatgtaagagtgaactgttaatcctggcaaaagaggctttggcataattttaatttccctcagacttattttataaaatatactttaaactatcttcttgtaaaacaaatgatgacaatttgcagaaaagttattaaaacattgaaagaacaggttgcaagatctcatcacaaatctctaagtggtatctggattgttttgttttgtttcaacactcatttgccagaacccttaggatagcacatgaggtgtaaccggaaatcgaggcgttgggtgtcatggttactttgcagggctgggccccgggacttttctgcaggaagttcattgctcacccaagatgcctccagaagaaagcagaaacttccgagaggagcgtgaatgctctgtttctgtgctgcagaaacaattcctagtttatttgtttcctaaattaagtttatcttattggtttttgtttttccaaaagcaatgcatgctcattacaggaagcacagaaagctacaaacaagtaagtgaacactaaaaaatactgtaatctcaccaaggtagacaaatagcttggtgtctctgtccttgtaacccatttctatgctgcatgcatccatccaaaagtgagaggcaaactattattgttttttgttaaatgacaaaaatagtacttgctaattgctcaaacattatgacattaatgtagaacaaagccaatttattatgctcattaaaactttttctttttttaaaatctaaaaattttgattggagaaggattagagactaaattgttgatatttgaattttattgtggttttggttaaagtttgatgcaggaccttcagagcaaagagagggtacaatggtgacctttaaacaatatatatattttttgagacggagtctcgttctgtcgccaggctggagtgcagtggcacgatctcggctcactgcaacctctgcctcctgggttcaagcgattctcctgcctcagcctctcgagtagtgggattacaggcgcccaccaccacatccagctaatttttgtatttttaatacagacagggtttcaccatgttgatcagcatggtctcgatctcctgaccttgtaatctgcccgcctcagcctcccaaagtgctgggattacaggcatgagccactgcgccgggccctttaaacaagatttaaagaccagcacacaaagtttctgagtacaaaaaaaggtaatattttaggttagggtcattagaccagaattagaatcattctttttttttctttttttaattaaaaaagatggggtctccttattttggccagattgaccttgagcctcaagcaacttctgcctcgacctcccaaagtaccaggattacagatgtgaaccattgcacctggccagaatcattcttttgataataatgatggtaattgagtttatatgctgtgttctcatgaatccaagcagagcccactgtttccagagattcccttggcagccaccctgggttgaggagggtcccctcctggcacagctggaaccaccggtgaagagccatttttcagtcagcaccgtttagtaatataagacttttagcctcgaggagtcttccgttgttagttcctaactttaatgactttgtggtaaaaattccttagcgaatgacttctgtgcaacaatcatgtaatttttaaaattccagatgctttagccgttcagaatccattttttctttcaaaaccagagttcaccagctgtttctcttgagcgaagactttgcaatgagctttcaaatgttcacaccaagtagaagcaggaagggagaactgtggctgggcaatgaatgaaatactgacatttagctgtagaaggtaggcaggggctcacatggtgtgcacagccccttatatgactactggtcctgtatctgcttcctttccctgccccatttcccctttggctttttgtcatgactcagaaatggatgctagacattatggggctccctccagtcactcgggtcactcgtcacagacttataaacagaatcacagaacttattgtcagatgaagcttcaaaacaccagttggctaaactccttgtgttctggcaggtaagatgtcggcatccttatttaacaaatgatgctactgagaactatgtatgcagagacatagtctcaaaataagtgcagtcatgcctcgcataatgacgttttgtcaatgtcacatatgtgagagtggtcccataagattatactgggctgtcaatttcctaatgcctagtatttactatacattttaatgttattttgtgtacttctacttagtaaaaaaaagttaactgtaaacccgcctcaggcaggtccttcaggaggtatcagaagaaggcattgttgtcataggagatgatggctccatgcgtgtttttgccttgaaggccttccaacgggacaaggtgtggaggtggaaggcagggatagtgatgatcctgaccctgggtaggcccaggctagtgtgtgtgtttgtgtcttagtttttaacaaaaagtttgaaaagtaaaaaaataaaaattaaaaataggagcttataggataataaggatataaagaaaaaatatttttgtacagctgcacaatgtatttgtgttttaagctgtgtttttataaaaaagtcaaaaaattaaaaaaatttaaaaattattatatataaagtaaaaaaagttatggtacgctaaagataatttattgttgagaaaaaaatttaaatgaatttagtatagcctaagtgtacagcgtttataaatacagtagcatgaaattatgtcctcaaccctcacgtgcactcaccactcactcactgactcacccagagcaacttccagtcctgcaagctccatgcatgataagcctcctatagaggtgtaccatttttcatcttttatagtgtatttttactgtaccttgtctatgtttagatatgtttagatggaaaagtacttaccattgtgttacggctgcctacagtattcagtacagtaacatgctgcacaggtttgtagcctaggaacagtagctatacaatatagcttaggtgtgtcatagcctataccatctaggtttttgtgagtacactctatggtgtttgcatgacaaaatgacctaatgacacatttctcagaaagtgtccctgtcaataagtgatgcatgactgtgattgaaataagtagccccacattatttttctcatgtcaacttcaggttaattttccagccacgtggccttgtgcttgctcatcataaaaaaatgtggataaaattctacctgttaagccacaacatttgcctgtcatgggtggacatttaccgtttattttcagagttcaaagtttgaactctcagagaaatgcaaataagacagtaaactcctcgaggtgaggaatggcaatctctgaagataaatcatatatttattgtacagtattgaatgttgtaagtggcagtagagatcatgtaatctggccttcttcttttacaggtgagaaaagtgagaaacagcagcagagtgattgttagaacctggctcctcttcttttacttagaactgttttcattaagttgtgtttcatttcatagttctgtataattcatccctgcttaagatacattaaatgaattgaactgaatcccttttttttgagctatgatggctcttaaaaacttagattttcagccaggcgcagtggctcatgcctgtaattccagcagtttgggaggccaaggtgggcagatgacctgaggtcaggagttcgagaccatcctggccaacatggcagaaacccatctctacttaaaatacaaaaatcagctgagcatggtggcgtgtgcctgtaatcccagctacttgggaggctgaggctggagaatcgcttgaacctgggaggcagaggttgcagtgagccaagatcatgtcactgcactccagcctgggctacagagagagactccgtcaaaaaaacaaacaaacaaaaaaccacgtagattttcaagtaattactattgttacactaaatgtcaatggatccttaagaatctatttgttcatgaattcattatttattcattcaacgtttattgagtggctacttggttcagaattagaattagcatgacagccacacattagaaaggtatcactttttgactaaattaaaaacttgctaaaaatagttatccattgatggaataggctaccccgaaaggcagagagcattttgtcattggaagtatgtagggcagtgtggatgactctagggtgactgtcatgagggttctgcactggggagggggctgcgttggatgatgaatgggaacccttccagtgctaagatgctgtgatcgttgtcctgcaggattgggattgtgcaggatttgagctactgtgtaaatttcctattccctgctcattgggcttccacattttgcttccttcccttgcccaggtggttccatttcaggaagcctagatagcttctttgcagtcatctgcccgaatgtcgtagctactttaactccccagagctgtacatgtctaggattgatattgatcattaacacaattatgttcgcccagatgaacaaatctaccaggagtagaaacgtgcatttgacaggtggccttgcatggagactaatcgctttcacaggttgaaaggtgaaatatctaaagtttaatgagtaagttgtgtcctgaatgtggaatctgagttgaaattgcattttgtgacatgtacgcctacctaacttttctttttcatacctgtcatctttttttttttttttttgaaacggagtcttgctctgtagcccaggctggagtgcagtggcgcagtcttggctcactgcaacctccgcctcccaggttcaagcaattcttctgcctcagcctcccaagtacctgggattacaggcatgccccaccacgtgcagctaatttttgtatttttagtagagacagagtttcaccatgtcggccaggctggtcttgagctcctaaactcaagtgatccgcctgcctcggcttctcaaagtgctgggattacaggagtgagccaccgcgcctggcctgtacctgtcatctcttggtttgtgagtggattgattattggactttatttttaacacaggagaatgtgcgtgttttgcatttgtagtgaaagcatgcctcatcttactccaacactgataggaaaaggaagattattttacaatggtcaagtgaaaaaaaaagtaaatacagagataaaacggggttctaatatttctgctacactggaaacttagagttgcaagagctgttttgggatcacaaatcttctgaagaaaaaaagtttgcgtatttcagtacaagtcttaatgtttccctagcgtcttgtgttatagctgcaggccaagcaaaatgaaatgtgagacactgtccttggggatagagcatctgtattcaatttaaacagtagatttgggggccttaaattgcctcgactctattaatcattttgtgttccttagtttatagaattatctcctagagacattaacttatccattaatttcttccattgtgtttatttattcattcacaaacactagcacctactgtatacacagtacagtgttgtacattgcagggtacttaaaaatgtagagtgccaggcatggtggtgcatgcctatagtcccagctccttggaaggctggggcgggaggattgcttgaggccaggagttcaaggtggcagtgcgctatgcttgtgcctacaaatagccactgcactccagcctggacaacatagcaagaccctgtctcaaaaaaaaaatgaaaaaactcccccaaaaccaaaaatgtagattgttctcaagggccatccagtctagagagaactaagggagcctggtattcttaggccttagagcttaacagccacacctaggatgcctcttcagaaggtgttccagcccttcctgtgtcttcccagttctgatactggattatgtcattatgtctctgttgagtaactccttccaatcaggcctgcacactgctgccaggacagtcctcacaaagcacagatctgattgggttattgttcctctgtggaaggggctttcagagactcattatctccccccaagcaaattcttagcatctcttttcaagctttccatacactggcccttaaacacttaaaacggacactctggcctttttattatgcacattattctgcccaccgagaatattacagaatccgtctttcttgctcccaatctgaacgcatcaaaatgtcatccctcatttaccacctagcaaatcaataatgcttctcagccttccctggttctctggaatcgtctgctctctccttcttctgttatagtttgttatggatataacctgtttttctgactccaatgtagacttcttcaactcaaggtttcagttctggtttatctccttactccctcatctatgtagtacacttatggtttactctgttctcactggattagaccaaactcttaattatatttaggatgtattaatccaatgcatagattaaccaagtctattatttttatatcttttgaaaccaatcaggagtttcagaagttcagttcagtttaaatatttattgagatgcatacactatatagtcagatactatgatagctcttgaatataaaaaatatatatacttatgtttgtatatatatgtgtaaattgatatgtaaattcaaatagatagtgttgtctacaccattgagaagcctatagtcccgtggaaaaaagagaattcattctcatgaagtttccggatattgtttcatcagaaggactgggcacatcggggtgtactaaaatcattaagaagtatttagcaccagtagatgcctaataaataccttacagtctagatggatggatagatggaggaagaaagaagggctcctttaatttataatttacctattgctgggtttactcctaggtatgacaattttgaaaacaatttactcaatgtttatttccacactgtgtatgaaatatgctgctcttcattcagaaagagatatataattctccatttgtagaacactgagttaatttcatggttgtgatgttgcttttgcttactttcacccacattttctcctctgtagggtggcagctccgtagggtggacacacgctttgggagacctgcagctgtttgtgtctgggggcaatggtgaagggcagtgactcattggcccagaactcatgatctcatctctcacccagctggctaatcggccttggggacaggaggatgagcgctgcactccctcctaatcatgcagcttttgtatgtctttctttacttgacttaaattgtaatttgaatggaaaaatggacaaattctatcatttgaatttaacttttatatattttcttgactctgatttgggattatctaagtgcatttattcaaatatttattgtgtttttgaaactttttttgaaaagcataaggtaatacatgataaaagatattgttattacccctgtttctgccatttcaaggagtcagaacaggctcagtggaaacaaaatgagatgtcttatgggagttactttcccttcagctaatcttggtatgaatttatattgacactacctttaaaattttattctgctttttaaattttactttaagttctgggatacatgtgcagaacatgcaggtttgttacataggtatacatgtgccatggtggtttgctgcacctatcaacttgtcatctaggttttaagccccacatgcattaggtatttgtcctgatgctctccctccccttgacccctaccccccagcaggccctggtatgtgatgttcccctccctgtgtccatgtgttctcattgttcaattcccacttatgagtgagaacatggggtgtttggttttctgttcctgtgttagtttgctgagaatgatggtttccagcttcatccatgtccctgcaaaggacatgaactcatccttttttatggttgcatagtattccttggtgtatatgtgccacattttctttacccggtctatcattgatgggcatttgggttggttctaagtctttgctattgtacatagtgctgcagtaaacatacgtgtgcatgtatctttatagtagaatgatttacaagcctttgggtatacacccagtaatgggattgctcggtcaaatgattagttttttatttatataaatttatggggtacagtgcaatttcattacatgcatagtttgcctaatggtcaagtcggggcttttaggatgtccatcacccaaataatgtacattgtacccattgagtaatttctcatccttcactcctcctatcctcacccttctgagtctccattgtctgttattccactttctacatccacgtgtggacatgatttagctcccacttgtaggtgagaccatgtgatatttgtgtttctgtgtctgacttgtttcatttaagataacggtttccagttccatcgatgttgttggaaaaggcatgagttcattttgtatggctgaatagttttcccttttgtatgtataccgtattttctttatccagttctctgttgatgaacatctaggttgattccatatctttgctgttgtgaatattgctgtgataaacatgtgagtccaggtatttttctgatacattgatttattttcctttgggtagatacacaatagtaggattgctatattaaatggtagttttatttttagttctttgagaaatctccatacttttttccatagagattttaataatttacattctcaccaatagtgtttaaaatttcccttttcacttttcactgcattctcttcaatatctgttattttttgactttttaataatggccattctgactggcataagatgacatctcattgtggtttcaatttgcatttctttgattagtagtaatgttgaacatgttttccatttgtatgtcttcttttgaaaaatgtctattcatgtccttttcacactttttaatggaattattttgttgttgttgttgaattgtttgggttccttgcatattctggatattgttggatgcatagtttgcaaatattttctcacattctgcaggttgtctcttaagtctgttgattatttcctttgctctgcagaagctttttagtttaactaagtaccatttccctatgcttttttgttgttgttgttgttgcctgtgcttttgaggtcttagtcatgaattctttgcatagaccaatgttcagaagagttttccctcagttttcttctagtatgtttatagttttgggtcttatttataagactttaattcatctttagttgaatttagttttgtatatgatgaggtataggggtccagtttcattcttctgcatatggccatccaatttccccagtatcatttattgaaaggggtgtcctttgcccagtgtatgttcttgtcaatgttgtcaaagatcagttggttgtaaatatgtggctttatttctgggttttttattctgtttcattgatctatgtgtctatttttataccagcctatttgttacctattgctgtgtttactcgttattctcttttttaatgagtaaaataccctttttaaaagacaacatccaaattaggagactgcctttgattaaaatgaataactattaatcatcacagagcagggaaagtgtgaatcatcaggaatttagtggagagaaatccactgttttgggtatgtctttgtattagtctggggtaaatttcttgaggacaaaccttgtctcatttgccttcttataattcatgttagacttatagtaacagtaaagacttactgaattgggttgctttaaaacagcatgtgtaatatagccaccatggcatgcaggagtaggtagaattgcccccaaccaggagtggctcttgaaacatcacagggagaggattaggtaacggttgggttagaaagaggagcacaaggcacttgtcttcatgttgcttgggctcacaagcacacttttcatgtagattgcgtgttcaagatcaacatgccaaaagtggcaaaaatctctaaaggagcctccatctacacatttcgtgagagaaaaatgtccattctccatatcaaagcacattatcatgattttaatttggagtggatttaggggactgatgaagcatggggcactgcagcatccccctagccaacccttacacctgtggtgctcccaacacctcctgcgttcatcatttatcatgaagtatggtgcattcctgaaacactggacaagtgcatcttctcctagaagcacggaggtacattccaaaggcaaactcacttaaattgtgatcagaatacttcaacttgcttgctattgttgtggataagtgatagttaaccacaaccggctgagtggccaggtggaaaggacatggatggggaaggaggttcagggtcctgcataagtcctctagtgtctgtagatctcagtgtcctcccttgtgaaaatggggataatatcagccctcaatttacacagttgtagtgaaggtccaatgtgatcagtgtttgtcacaacctgtcatcatttatgtgtatagaactgcttttactataaacttgcttgtattgtccccagcagccagtcctgcctataatctgttggcttcattgcttgtccagtgatctgtggctccctcctgtcctaatccaggtccaagtggattaatgttatctgattcacgttagtgtttctacagatatgtaatgttatctgaatcacattagtgtttctacagcaaaacagatgcttgttcccactaagtaggataaatgaagactctaaattgcttcacatctgtgcacatgaggttctgccaccatgtgagttcagtcaggtcagattactgccagatgaattagagaaggcttgaggttctcagagaattttggattttggaattagagatgatgcatcatggatttgtgcttaatagctgttttgctactttccctccccttcccctctctccctcctcctccacttccagttcttagcctcagttactattgtactgcctccgtttcttgagacaggctgctgatatgctgcctttggtctctgagccaccaggtatagcgctgcataatggaagaacagatgaacataagagtgtcttggggaagatgagcacaagacatcatggggttgtattgttacccccagcttcagcacattcccggagtgtaagtgcaggctggcttctccataaagcaacacagcagtatgctctgagtgggagtacctccgaaactcagcttccaaaactgtgggctcaccagacctccttggtattttttttttttttttttgagacaaggtctccctctgttgcccatgctggagtgcagtggcatgatcacagctcactgcagcctctacttgctgggctcaaatgatcctcccatctctgctctgcaagtagctgggactataggagtgtgtcacaatgcctggctatttttatttttatttattttttgtagagacaggatctccctatgttacccgggctggtctcaaactgctgggctcaagaaaacctcctgcctctgtctcccaaagggctgggattataggcatgagccaccacgctgtgcccctccctggtttttgatccttggtctgacccctggattctcctggttgacttacactctttggagtgctgactagtatagactctcccaatgctgccttttggatgaatcctgtgatgccacattttccagccttaggacaaatgataacctaccctgtagtctgtccatgctctggagaccctgctggtcttacaagatgaactggacaactgctttcactgataggcctgaaggaaaagggttggaactgtcaaggttccccattaaataccaaccagcaatgacaatcaaggtgagctattcttgtgctgggtaggatgctatcttgggctctgagtgtgtccggaattggtgggttcttggtctcactgacttcaaaaatgaagccgcggaccctcgcggtgagtgttacagttcttaaaggcggcgtgtctggagtttgttccttctgatgttcggatgtgttcggagtttcttctttctagtgggttcgtggtctcgctggctcaagagtgaagctgcggaccttcgcggtgagtgttacagctcttaaggcggcgcgtctggagtcgttcgttcctccttgtaggttcgtggtctcgttggcttcaggagtgaagctgcagaccttcgtggtgactgttacagctcataaaggcagtgtggacccaaagagtgagcagcagcaaggtttgttgcaaacagcgaaagaacaaagcttccacaatgtgcaaagggaccggagagggttgccgctgctggcgcctgcagcctgcttttattctcttatctggccccacccacatcctgctgattggtacagcccagtcgtctgttttgacagggcgctgattggtacgtttacaatccctgagctagacacaaatgttcgccacctccccaccagattagctagatacagagtgtccattggtgcattcacaaaccctgagttagacacagggtgctgactggtgtttttacaatccctgagctagacataaaggttctccaaggccccaccagactcaggagcccagctggcttcacccagtggatcccgcaccggggctacaggtggagctgcctgccagtcccctgccgtgtgcctgcactcctcaggccttgggtggtcgatgggactgggcgctgtggagcagggggcggcgcttgtcggggaggctcgggctgcacaggagcccacgaagggcggggaggctcaggcatggcgggctgcaggtccccagccctgccccgcgggaaggcagccaaggccttgcgagaaattgaacacagcagctgctggcccaggtgctaagcccttcactgcccggggccggcggggccggccggccactccgagtgcggacccgcggagcccatgctcacccggaactcgcgctggcccgcaagcaccgcgcgcagcccccggttcccgcccgcgcctctccctccacacctgcctgcaagctgagggagccggctccggccttggccaacccagaaaggggctcccacagtgcagcggcgggcggaagggctcctcaagtgccgccaaagtgggagcccaggcagaggaggtgccgagagcgagcgcgggctgcgaggactgccagcacgctgtcacctctcgtgagtatctctagtgctgctggcgatgagatgattcagtgtggatgattgataccaaatgtatcatggacagtgaaggctgtgtaacaacacatataggtaggctctgttacaggagttacagttctaggcccagtaaatcttttttttttcactgtgcaattgaattttggttttacctatataacattttcatctgtatgaaatgtaagctctatacaattctccattaggacattgtgtggattttggtgtttctgaatctcttctggctcagaaaattccctgctcttgctggtataatttcatacccaaagagggcattctaaccttgaaagaagttcagctcagcagagcgtctgtcattgcctttctctgtaaacacagttttccttcttccttggcttctcaggtgttttagctccagggaggaaatagtcacagtgaaaatctatttaataaaaccgttatgaaaatgtactcaacctgagcatgcactggaacagcagaagatgaggacttggtctactgccttcccaccaaaccttgccggctctgtaaattttcagagctgtcacttgtgagctatttccaccaagggagagcttctgtaaagttggggacttggcaggccatttcgctaattctttgggtgttcttttagcattgtctgcagtgagtgtgggagtcaaaggcccttcagtgcagagataatgccatcttgttccctggaaccccgaaagagccagagtcaaaggagctttttgtttcactcatagaaaaacccacaggaaatcccagcttcagatattcctattcagtttccttgtcccttcagatctcactgtgtttaggcctcctttgagtgaggcaataactagtaaaaaaaaataaaataaaataaatgaaagaatgccattcatggtggcttggggactgggcacacacactgtatacacggtgtgggggccttccccgggacgctgatgtccttgttctcctagcagtcaaaaattggccagtgaaatacagagaatactagctacctcatactgttaagagaattgactgcggtcagatgtgtagagtttcaagtacatacagtttctgcctcactgtaggcgctcaatattattattgaggagctattattagatttcacatctctgccagctcttgtgtcacttattaagcatatgactgggaataagctatttaattctcttcgtctgtaagataggaagtaataatgcttattttgtgggcctattgtgaggatcatgtaagatgagagataaaagggcttagcaaacggtagcatattacaggtggcctgcagcctgccgctgtgcaggtgacgtcccacacaatggtactggccgaggggtgaatggagccctggtgctgaggatggcgagcctttttctaattcatcagctcagaggtgccacctttttctaatttaccctccctaagaggacatctttttatattttaccagcccacagaagataccttttaaaaatttgcacaatggtaccatatgtgctagctgcaattctgtcaacaagagaaagatgttatttttagtgtagcagacagagaattctggagagggcacatggcatgctttatctggctccaacttggtcatttctgtttaatttcaatgatctgattgccatagagtcagaggagcaattttgctattgcccaaattctacattttcactaggattttccttgaaggcaaggactataacccccaccctgcccatcaccttgcttgctcaccactgccctgtacatatccttcagaatggacatttgttaacaatgggtaagagtgtaggctggcctttcacttaccttcctgtgctttgctctttactgctagggctagcagccggaaagctacatatcccaggctttctcgccagctcatttgctgttaaattctgttaataggaggcactggtgggagaccagtaagacggagagaaaaacttcctgattctgggttttactgtgaggccattgcaagcagttgctgtagtgatagtaaggaaggggtgagttggaacatcagcaaccctgcaggtaacccccttattggggctccaatcttagttgatgtagcacttccttggtggcttcagagccaaatggcacaacctcctcaacagtacagcagattgagaaggctgagggacatcgtttaggagcattaatgatgggtgtctagctatgacccccttttccttttcacttctgtcctctccttctcctttgttctcttctagttctttctatatctttgtaacaaattccctatattaaatttcttctgcttgagatacttgaagtggtcttagtttccctgcatttagcacgtggactctctgaatctgttgggtgcttagggcctgggtttgtgccctaggatcctgtgactgaattcttcctttctctttccatcctcatcatgcatgcaggattgtcgcagtagcctttaaatagattttcagccaccagcctctttctgttcactgtggacattattggtagtttaatttttctaaaaatctattttctggatccacatttctgctcaaaactctatttttatgataactatttaagcataggtatagtcatctatgacctaaaccccaaaggcaggatcgtcaccatggccaccttttctgtgatcctaataacagagagatctgtgtcagaagaggattggttgttctttcaccctggctaactggaaggcagggagctcagtggtagacacaccggtcatcatgctggtgtgggaaagatttcaaagcctggccatagctcccactgaagctcctttctgcaccttactgcttccttgtacaagtcaaaccagggcctttagagcagggaccttcattgcactgccctctcctcgcctcccaaatgataatatccagctttcaaggtctgcctgatgtcccagggttaggagggcagagaccaggcagtttatgtcatgtcacttcttttttttttttgtcttttaaaaaatttattatactttaaggtctggggtacatgtgcacaacatgcaggtttgttacataggtatacatgtgctatgttggtttgctgcacccactaacttgtcatttacattaggtatttctcctaatgctatccctccccgcaccccacgacaggccccagtgtgcgatgttccctgtcctgtgtccaagtgttctcattgctcaattcccacctatgagtgagaacatgcactgttcggttttctgtccttgcgatagtttgctgagaatgatggtttccagcttcatccatgtccttgcaaaggacatgaactcatccttttttatggctgcgtagtattccatggtgtatatgtgccacattttcttttctttttttttttttagagataacaatactcactttcaacaatttctagaactacagagaagaaaaacaaggaaatagaagatttgagcaacacaattaactagacctaacacacatctacagaacagtctatccaacaatagcagaatatgtacttttctttttttttttttacaataacagtgttatcatttattattttgattaactcgtcatttagcattaggtatatctcctaatgctatccctccccactccccccatgccacaacagtccctggtgtgtgatgctccccttcctgtgtccatgtgttctcattgttcaattcccacctatgagtgagaacatgcggtgtttgattttttgtccttgcgatagtttgctgagaatgatggtttccagcttcatccatgtccctacaaaggacatgaactcatccttttttatggctgcatagtattccatggtgtatatgtgccacattttcttaatccagtctatcattgacggacatttgggttggttccaagtttttgctattgtgaatagtgctgcatataaacataagcgtgcatgtgtctttctagtagcatgatttataatcctttgggtatataaatagcaattttgctattgccccaattctaaatttttggggcaatttagatcgctgggtcaaatgggatcactgggccaaatggtatttctagttctagatccttgatgaatcgccgcactgtcttccacaatggttgaactagtttacactcccaccaacagtgtaaaagcattcctgtttctccatatcctctccagcatctgttgtttcctgactttttaatgatcaccattctaactgatgtgatatggtatctcattgtggttttgatttgcatttctctgatgaccagtgatgatgagcattttttcatgtgtctgttggctgcataaatgtcttcttttgagaagtttctgttcatatcctttgcccactttttgatgggcttgtttatttgttttttcttgtacatttgtttaagttctttgtagattctggatattagccctttgtcagatgggtagattgcaaaaattttctcccattctataggttgcctgttcactctgatggtagtttctgttgctgtgcagaagctctttagtttaattagatcccatttgtctattttggcttgtgttgccattgcttttggtgtttcagttattaagtccttgcccatgcctatgtcctgaaaggtattgcctaggttttcttctagggtttttatggttttaggtctaacatttaagtctttaattcatcttgaattaatttttgtataaggtgtaaggaggggatccagtttcagctttctacatatggctagccagttttctcagcaccatttattaaatagggaatcctttccccatttcttgtttttgtcagctttgtcaaagatcagatggttgtagatgtgtggtgttatttctgagggctctgttctgttccattggtctatctctctgttttggtaccagcaccatgctgttttggttactgtagccttgtagtatagtttgaagtagtgtgttgcctccagctttgttcttcttgcttaggattgttttggcaatgcaggctcttttttggttccatatgaactttaaagtagttttttccaattctgtgaagaaagtcattggtagcttgatggggatggcattgaatctataaattaccttgggcagtatggccattttcacgatattgattcttcctatccatgagcatggaatgttcttccatttgtttgtgtcctcttttatttcgttgagcagtagtttgtagttctccttgaagaggttctttacatcccttgtaagttggattcctcggtgttttattctctttgtagcaattgtgaatgggagtttgctcatgatttgggtctctgtttgtctgttattggtgtataggaatgcctgtgatttttgcacattgattttgtatcctgagacattactgaagttgcttatctgcttaaggagattttgggctgagatgatggggttttctaaatatacaatcatatcatctgccaacagggacaatttaacttcctcttttcctaatggaatactctttatttctttctcttgtctgatggccctggccagaacttccaacactatgttgaataggagtgctgagagagggcatccctgtcttatgccagttttcaaaggtaatgcttccagtttttgctcattcagtgtgatattggctatgggtttgtcataaatagctcttattattttgagatacattccatcaatacctagtttattgagtttttagcatgaagtgctgttgaattttgttgaaggccttttctgcatctgttgagataatcatgtgttttttttcattggttctgtttatgtgatggattacgtttattgacttgcatatgttgaaccagccttgcatcccagggatgaagctgacctgatcatggtggataagctttttgatgtgctgctggattcggtttgccggtattttattcaggatttttgcatcgacgttcatcagggatattggtctaaaattctcttttttgttgtgtctctgccaggctttggtatcaggatgatgctggcctcataaaatgagttagggaggattccctctttttctattgattggaatagtttcagaaggaatggtaccagctcctctttgtacttctggtagaattcggctgtgaacccatctggtcctggactttttttggttggtaggctattaattattgcctcaatttcagatcctgttattggtctattcagagattcaacttcttcctggtttagtcttgggagggtgtatgtgtccaggaatttatccatttctcctcgatttttctagtttatttgtgtagaggtatttatagcattctctgatagtagtttgtatttctgtgggatcagtggtgatatcccctttatcattttttattgcgtctgttttattcttctctcttttcttctttattagtcttgctagcggtctatcaattttgttgatcttttcaaaaaaccagctcttggattcattgattttttgaagggttttttgtctctatctccttcagttctgctctgatcttagttatttcttgccttctactagcttttgaatgtgtttgctcttgcttctctagttcttttaattgtgatgttaggatgtcaattttagatctttcctgctttctcttatggacatttagtgctgtaaatttccctctacacactgctttaaatgtgtcccagagattctggtatgttgtgtctttgttcgcattagtttcgaagaacacctttatttctgccttcattttgttatttacccagtagtcattcaggagcaggttgttcagtttccatgtagttgtgcggttttgagtgagtttcttaatcctgagttctagtttgattgcactgtggtctgagagacagtttgttatgatttctgttcttttacattttctgaggagtgctttacttccaattatgtggtcagttttggaataagtgcaatgtggtgctgagaagaatgtatattctgttgatttggggtggagagttctgtagatgtctattaggtctgcttggtgcagagctgagttgaagtcctggatatccttttaaccttctgtcttgttgatctgtctaatattgacagcggggtgttaaaagtctcccattattattgtgtgggagtctaagtctctttgcagatctctaaagacttgctttatgaatctgggtgctcctgtgttgggtgcatatatatttaggatagttagctcttcttgttgaattgatccctttgccattatgtaatggccttctttgtctcttttgatctttgctggtttaaagtctgttttatcagagaccaggattgcaacccctgcttttttcttttttgctttccatttgcttggtagatcttcctccatccctttattttgagcctatgtgtgtctctgcacgtgagattggtctcctgaatacagcacactgatgggtcttgactctttgtccaatttgccagtctgtgtcttttaattggggcatttagcctatttagatttaaggttaatattgttatgtgtgaatttgatcccatcattatgatgttagctggttattttacctgttagttgatgcagtttcttcctagcattgatggtctttacagtttggcatgtttttgcagtggctggtacccgttgttcctttccatgtttagtgcttccttcaggagctcttgtaaggcagacctagtggtaacaaaatctctgagcatttgcttgtctgtaaaggattctatttctccttcacttatgaagcttagtttggctggatatgaaattctgggctgaaaattcatttctttaagaatattgaatattggcccccactctcttctggcttgtagagtttctgctgagatatccactgttagtcatcagacttccctttgtgggtaacccgacctttctctctggctgcacttaacattttttccttcatttcaaccttggtgaatctgacaattatatgtcttggggttgctcttcttgaggagtatctttgtggtgttctctgtatttcctgaatttgaatgttggcctgccttgctaggttggggaagttctcctggatagtatcctgcagagtgttttccaacttggttccattctccccgtcactttcaggtacaccagtcaaacgtagatttggtcttttcacatagtctcatatttcttggaggctttatttgtttctttttactcttttttctctaaacttctcttctcgccttatttcattaatttgatcttcagtcgctgataccctttcttccacttggtcaaatcagctattgaagcttgtgcatgcgtcatgtagttcttgtgccatggttttcagcttcatcagttcatttatggtcttctctacactgtttattctagttagccatttgtctaattttttttcaagggttttagcttcctagcaatgggttcaaatgtcctcctttagctcggagaagtttgttattactgaccttctgaagtctacttgtgtcagctcgtcaaagtcattctctgtccagctttgttctgttgctggcgaggagctgtgatcctttggaggagaagaggtgctctggtttttaggattttcagcttttctgctctggtttctccccatctttgtggttttatctacctttggtctttgaagatggtgacctacagatggggttttggtgtggatgtcctttttgttgatgttgatgctattcctttctgtttgttagttttccttctaacaatcaggtctctcagctgcaggtctgttggagtttgctggaggtccactccagaccctgtttgcctgggtatcaccagtggaggctgcagaacagcaaatattgcagaacagtaaatattgctgcctgatccttcctctggaggcgttgtcccagagaggtgcccgcctgtatgaggtgtcagtcggcccctacttggaggtgtctctcagttaggctacacaggggtcagggagccacttgaggaggcagtctgtctgttctcatagctcaaacaccatgctgggagaaccactgctctcttcagagctgtcagatagggacgtttaagtctgcagaagtttctgctgccttttgttcagctatgccctgcccctagagctggggtctacagaggcagcaggccttggagagctgcggtgggctccgcccagttcaagcttctccagccgctttgtttacctactcaagcctcagcaatggcagatgcccctccctctgccaggctgttgcctcgcaggtcgatctcagactgctgagctagcagtgagcaaggctccatgggtgtgggacctgctgagccaggcacaggatgtaatctcttggtgtgctgtttgctaagaccattggaaaaacgcagtatttgggtgagagtgtcctaattttccaggtacagtctgtcacagcttgccttggctaggaaagggaaatcccctgaccccttgtgcttcctgggtgagataatgccccgccctgcttcggctcaccctgtgtgggctgcacccactctccaaccagtcccaatgagataaacaggtacctcagttggaaatgcagaaatcaccatcttctgcatcgatcatgctgggagctgcagaccagagctgttcctatttggccatcttggaacagaatgcatcatgtcacttcttatacatgaatgagaataactgtgaaatgtgcacatgtgctctgagcctagataagattgttactatcatgttatattgttattattgtgttattatcgttattatcatgttattttcttacccataggttttccaacttgcttgaagtaatgctttcaggatactcaatattgaatattcaatactgatgggaaaactttcttaaaggaaatggacattacagggtcaactggaggaaaaataacacatttactgctcaaacatagcttgttgtttttatatttaaaaacataggcattgtaaaaagtcaaacaagcctgaaaaatgtatgggagaagatgaaatgatcactgaagtcacatattcctcactgttaatgatttagggaacatccttctagaaggttcacagagccatacaactttaccgaaatgggattatgttgcatcttgttttccaacctaattttttcccacttagtagtatagcacagatatgttttcatgtcaaccagtatgactttacactgttatttctttcttcttttttttctgagatggaggctcgctctgtcgcccaggctggagtgcagtggcacgattttggctcactgcaacctccacctacctggttcaagcgattgttctgtctcagcctcctgagtagctaggattacaggtgcctgccaccacacctggctaatttttgtatttttaatagagacggggtttcaccatgttggccaggctggtcttgaactcctgacatccggtgatctgcccgccttggcctcccaaagggagggattacaggtgtgagccactgtgcccggcctaatggttacacagtattccatgctgacaccataatttactcatccagttacattaaattggaatgttcatagttgttgacctttagaacatgccagtattaagtttttgtatttaaggtgatgctagttctaaagcatatattctgaaatctcagtggcttaacacctcagaagtttatttctccttatgtaaagtttaggttctctccatttgctgatggttaccttgaggtaccaggcttgcgtggaggggctgctgtgccttgcatggccatgcagggactcaggccctctccagcgtgtggtttgcaaggttgccctggcccttgctgcttagctggctgatagtggaagagaaagtgaagaagatgtcacaggaggttttaatggatcagaactggaagtggcagatactgcttctgcccccattccattggccagaatgtcacatggccatacaaaactgcaagggaggctgggaaatgccactcatctgtgtgtgtgggaggaaaggaaatacatttggtgaatactagctagtctctaacagagcttcccctactgtttaccaaattcctgttttgcttttcccctcacacacagaacacacccctcccagagtgagggaccctaagtcccatccagccctggcaccttgcttagtcactgttcaggatctctgggtgatgtgctgtcttccccatcacatctaaatgaggatccttgtggtttgatgacttatgaactagaagagaataaagttatttgcctcctccctagcgcctcccaattttcaatgaagcagggaagcattgtaacattagaagctcccatttagaacagagtaaagagcgggcagcacagtcatcacaggcccaaagcaacaatggaatccagttgggtgggcaaggtggaggttctcaaccagagggtgggagaactttcttgattagaccttgattttgccagaaaaggcaatctcttctcagttggtctccatggtccgagctctgtcctggcaagttccttcttgcactttattctcaatggctacgtttgaagtgattgcaggggagtccgccatcttaggagggtacacagctttgcagccctctagtgccctgctgttgtttcaaggctcaaatagacaaacgtctttaaaaaattttatttttagtccaggctcatggtttctttggccatacatttatgtcaaaaatttgataggattctgttttttttttaaattaattacttttatttttgacaaataatttacatatttatggggtacaatgtgaagctttcatatatttattcactatgaaatgattaaaccaagctaattaacatatccatcatttcacgtgtgtgtgtggtatgaaatttttgtgtgtgtgtggtatgaaattcttagcaattttgaaatatattgcattattattaactatagtcaccatgctgtggaataaatcttaagaacttattccttctgtctaactgaagctttgtatactttgactaacatcttcccatccacttctacccttgccccagcccctgctaaccaccattctattctctacttccgactttttttagattacacctgtaactgagatcatgcagtatttttctttctgtgcttggattacttgtttctgttctgttttcttcccttaagttttttatgccaatagcaaatccctaagtttttttcctagatattattaccaagcttgaattattatattactttctcaccctaatacccttttctgtcaatgagatggtgacttccttgaggccttcagggtcagatgggaaggcaaaattcttaattagctctttgctacaaggctgaatcttttacctgtgtcactcaaaagccttttcaatcttgtttcttactcctcagactttagaagcagtcatttcttccaaggctttacactcagaagtttctggacaaacatctggactctattccctttcattttatgcttgcaaaccaacaaattctttttttaaaaaagtattttaatagctttaggagtacaagtggtttttgcttacatggatgaatggtatagtcctgaagtctgaaattttagtgtacccaagttgcgtacattgtgcccaatatgtaacttttaaagtcgcccctcccacactcccctattctgagtctctaaagtccattatatcactttgtgtgcctttgtgtatccatagcttagctcccatttaccaatgagaaagtacagtgtttggttttccactcctgagttagttcacttagaataatggcattcagttccatctgagttgctgtaaaatacattatttcattcttttttatggctaactagtattccatggtgtatatataccacattttcttcatccactcattgattgatgggcacttaggttggttccatagctttgcaattgtgaattgtgctgtgataatcatatgcatgcaggtgtctttttgatgtaatgacttcttttcctttgggtacctagtccagtagtgggattgctggattgaatggtagatctacttttagttctttgagaaatctccatactgttttccatagaggttatactgatttatgttaccaccagaagtatataagcttttccttttcaccatatccatgccaacatctcttgttttttgactttttaataaagggccattctgtttgggataaggtggtttctcattgtggttttaatttgcattccctgatgattagtgatggtgagcagtttttcgtatgtttcttggccatttgtatatgttattttgagaaatgtatattcatgtcatttgcccactttttaaagggattttttccccttgctgatttgtttgagttctttgtagattctgggtattagtctgttgtcggatgcatagtttgcaaatattttctcccattctgtgagttgtgtgtttactctaatgattatttcttttgctgtgtggagcattttagtttaagtcttatttatttatctttgtgttggttgtttttggggtcttagttataaattctttgcctaggctactatccaaaataatttttcctaggttttgttctagaatttttatggtttcaagtcttagatttaagtctgtaatccatcttgagttgatttttgtgtatagtgagagatagagatccagtttcattcttctacatgttgctatttagttttcccagcaccatttattgaatagcatgtcctttcttcaatttatgtttgtatatgctttgttgacgatcagttggttgtaactatttggctttatttctgggttctctattctattctatttgtctatgtatctacttttataccaataccatgctattctgattacaatagccttgcagtataatttggagtcagttattgtgatgcatccagatttgttctttttgctcaggattactttggctgtctgtgctctttttttggttctatatgaattttaggattgttcgttctttctttttcttttcttcaacttttattttaagttcatgggtacatgtggaggatgtgcaggtttgttacacaagtaaacgtgtgccatggtggtttgctgcacagatcatcctatcaactaggtattaagcccagcatcaattagctattcttcctgatgctctccctcccacccactgcccactgatagttcccagtgtgtgctgttcccctctatgtgtccatgtattttcatcatttagttcccacttatagatgagagcatgcattctttggttttctgttcctgtgttagtttctggaggataatggcttccaactccgactccatccatatccctgcaaaggacatgatcttgttcctttttatggctgcatagtattccatagtgtatatgcaccacatttatttatccagtccatcattgatgggcatttagattgattttatatctttggtattgtgaaaaatgctgcaatgaacatacacatgcatgtatctttataacacaatgatttatattttttggggtgtataccccgtaatgggattgatgagtcaaatggtacgcctctaggtctttgaggaatcactacactgtcttccacaatggttgaactaatttacactcccaccaacaatgtaaaagcatttctttttctccacaacctcaccagcatctgttgttttttgacatcttagtaacagccattctgactggtgttagatcgtatcttattgtggtttttatttgcatttctctaatgatcagttatgttgagcgttttgtcatgtttgttggctggatgtatgtcttcttttgaaaagtgtctgatgatagtttcttttgctgtgcagaagctctttagtttaattagataccatttgtaggtttttgcttttgttgcagttgctttggtgttttcatcatgaaatctttgtccatgcctatgtcctgaatggtattgccttggttgtcttgcagcatttttatagttttgggttttacacttaagtctttaatccatcttgaattgatttttgcttaaggtgtaagggatgggtccagtttcaattttctgcatatggctagccagctctctcagcaccatttattaaatatggagtcctttccccattgcttgtttttgtctagtttgttgaagatcagatggttgtaggtgttgggtcttatttctgagttctgtattctgttccattggtctatgtgtctgttcctgtaccaataccctgctgttttggttactgtagccttgcagtatagtttgaagttgggtagccatgatgcctccagctttgttctttttgattatgattgtcttggccatttgggatttgttggttccacatgaattttaaaatagttttttctaattctgtgaagaatgtcaatggtagtttaatgggaatagcattgaatctataaattgctttgggcagtatggctattttcatgatattgattcttcctgttcatgagcatggaatgtttctccatttgtttgtgtcctgtacgatttctttgagcaatggtttgtagttctccttgaagaggtccttcacttcccttgttagctgtattcctagttattttattctttttgtagtaattgtgaatgggagttcatttatgatttggctctttgattgcctgttgttggtgtgtaggaatgctagcaatttttgcacattgattttgtatcctgagactgctgaagttgcttatcagcttaaaaagcttttgggctgagatgatggggttttctagatataggatcatgtcatctgcaaacaaagataatttgacttcctctcttcctatttgaacaccctttattttgttctcttatctgattgccctggccagaacttccaatactatgttgaataggagtggcgagagaggacatcttgttttgggctgtttttcaaggggaatgcttccagcttttgcccagtcagtatgatattggctgtgggtttgtcatatatggctcttattattttgaggtatgttccttcaatacctagtttattgagaatttttaacatgaagggatgccagattttatcgaaggccttttctgcatatattgagataatcatgtggtttttgtctttagttctgtttatgtgatgaatcacatttattgatttgcatatgttgaaccaactttgtatcctggagatgaagccaacttgattctagtggataagctttttgatgtgctgctgcattcagtttgtcagtattttattgaaggtttttgcattgatgttcattaaggatatcggcctgaggttttctttttttttgttgtatctctgccaggttttggtatcaggatgatgctggcctcatagaataaattggggatgagtccctccttttcaattttttggaataatttcagtcaaaatgatacccctttttctttgtacctctggtagaattcagctgtgaatctgtctgttcctgggctttttttggttggtaagctatttattactgtctcaatttcagaactcattattggtctattcagagattcaatttcttcctggttcagtcttgggagggtgtatgtgtctaggaatttatccatttcttctagattttttagtctatgtgcatagaggtgtttacagtattttctgatggttgtttgtatttctgtggggttagtggtgatatctcccttaacattttctattgtatctatttgattcttctctcttttcctctttgttagtctagcaagtgatctattttattatttttttcaaaaaaccagtttctggatttgttgatttttttgaagggttttttgtgtctctgtcttcttcacttattatgccctcatcctggttatttcttgtcttctagctttggagtttgtttgctcttggttctctagttctttagttgagatgttaggttgttaacttgagatctttctagcttttgatgtgggcatttaatgctctaaatttccctcttaacaccactttacctgtgtcccagagattctaggacattgtctctttgttctcattagtttcaaagtacttattgatttctgccttaatttcattatttacccaagagtcattcaggagcaggttgttcagtttccatgtagttgtgtggttttgagtgaatttcttaatcttgagttctaatttgatggtgctgtggtctgagagactgttatgatttcagctcttttgcatttgctgaggagtgttttatttccaattatgtgatcagttttagagtaagtgccatatgtcaatgaggagaatgtatattctgctgttttgtggtggagaattctgtagatatctatcagatccacttgatccagggctgagttcaggtccttactatctttattaattttctgtcttgatttgtctaatattgtcagtgggttgttaaagtctcccactattattgtgtgggagtctaagtagtctaagtgtgtcattcttgaagaacttgctttatgaatctgggtgctcctatattggatgcatatatatttaggatagttagctcttgttgaattgaactctttaccattattaatgcccttctttatattttttgatctttgttggcttaaagtcttgttttgtcagaaattaggattgcaacccctacttttttctgttttccatttgcttggtaaattttccttcatccttttattttgaacctgtgtatgtcttgcatgtgagatgggtctcttgaagacagcacaccagtgggtcttggctctgtccagcttgccattctgtgtcttttaattggggcatttagcccaaaaaaaaaatatatatattttatattttttgagatggaatttcactctgtgtcacccaggctggagtgcaatggtgcagtcccagctcacggcaacctctgcctcccgggtgaagcgattctcctgcctcagcctcccgagtagctgggattacaggcacctgccatcttttagtagagatggggtttcaccatgttggccaggctggtctcgaactcttgacctcaggtgatttgcctgcctcaggcttccaaagtgctgggattacaggtgtgagccactgtgcctggcctagcccatttatatttaaggttagtattattatatgtgaatttgatcctgtcatcatgatgctagctggttattttgcagacttgtttatgtagttgcttcatagtgtcactggtctgtgtagttcagtgtgtttttgtagtggctggtaacagtttttcgtttccatatttagtgcttcctggtggtgatgaattctctcagcctttgcttgtctgaaaaggatcttatttctccttcatttatgaaccttagtttggtcagatatgaaatcttgggttggaaattcttttctttaagactgtagaatattggcccacaatctcttctggcttgtagggtttccattgagaggtcctcagttagtctgattggcttcccgttgtaggtgacctggcctttctttctggctgcccttcactttttttttttcatttcgacctggagaatctgatgattatgtgtctgggggttgatcttctcatggaggatcctactggggttctctgcacttcctgaattgaatattggcctatcttgccaggttgggtgagttctcttgaatgatatcctgaagtgtgatttccaacttggttccattctccctgtccctttcaggtatcccaatcagttggaggtttggtctcttcatagaatcccatatttcttggaggttttgttcattccttttcattcttttttctctattcttgtctgcctgtcttatttcagaaagatagtctttaagctctgaaattctttcctccacttggtctattctgctattgatacttgtgattgcattgtgaggttctcgtgttgtgtgttttcagctccatgagcttggttatgttcctctctaaactggctattctggctatcagcttctgtattgttttatcatgattcttagcttctttgcattgggttacaacatgctccttttactcagtgaagtttgttattacccaccttctgaagtctacttctgtcagttcagtcatctcagcctcagcccagttctgttcccttgctggagaggtgttactgtcatttggaggagaagagccactctggctttttgagttttcagcactgattctttgcttatctttgtgggcttatctaccttcaatctttgaggttgctggcctttcaatagggttttgtgggattctttttgttgatctttttgttgttgttgttttctgtttgtttttcttttcatagtcaggccactctaccgtagggctgctgcagtttgctgggggtctgctccagaccttggttgccttggtttttcctgtacctggagatatcaccagtgaaggctgcaaaacagcaaagatggctgccagctccttcctgtggaagctctgtgccagggggatactgacctgttgctggccagaacatatctgtaagaggtggctggagacccctgtttggaggtctcacccagtcaggtggaatggtatcagggacccatttaaagatgagtcttgctgctttttgtctgaggaggtgtgctgcattgtggcagacccttcctcatctggactgtttgcattctccaaagccagcaggctggaatggttgagtccactgaaccacagagatggcagccacctctccccctgggagctgcatccgagggagaggtcagagttctgttaatagaacccttgttggcgtggctgaagcccccacagggaggtccctcccagtaaggaggaatgaatcggggtcccacttaacgaagcaatctggccacagtgtggcaaagcagctgtgctgcattgtggggggcccttcctcatctggaccatttgtattctccaaagctggcaggctggaaaggccaagtctactggaccaaagagatggtggctgcccctctccctggaaactcggacctatctcaggcagattccagcctgttgctgttgtatgcctaagttaagttggtataaattcaaaatagattgttataactataggatattatatgtaattcccatggtagccacaaagaaaatatctatagaatgtacacaaaaggaaatgagaaaggcatcaaaatgtgcctctgtaaaaaaaaggtcaacaaaacacaaagaaaactggtcatggagaaaatgagggtcaaaaatactgtaagatataaaggaggcaaaatggcaaaagtaagtccttccatattagtaatcgagactctgtcttaaacaaaacaaaacaaaacaaaagaaacaaacaagcaaacgaaaaacgtccagtcaaaagcatagattggcagaatgaattaaagaaaaacatgatctaactgcatgctatgagagacccactttagatctaaaggttgaaagtgaaagcatagaacaagatgtaaatagtaacaaaaagagagctttggtgtctacactaatatcataaaatagaatttaagtcaaaaatttttacaagaaaaaaggacattatatgttgataaaagggtcaatttacctagaagatacaacaattcaaaacatatatgcaccaaacatcagagctccacaatatacgaagcaaatgttgacagaaatgaagggagtaatagacaactctgcaatcaaatgcctgaataatgcagtatgtgggctagtccagcctctctcatgatttccacatcactttgatgtggacatcctggacatctgcagttttcagttacttcctgtttcctgctggcatttaagtcccttgtactttatgtgaattcttacttcagttatactgcccctacaacttgcaatgaacattctcactttggttgtatcactttccaccctcctgcctgaaatctgatgctttccttcaagctccatccccactaggaagccttttgtatgagctaagattaacaacttgcatcctttaccctccacgtgttgcatatacctataccactcatttagcacatcacatttgatacttatttatttgacacatgtagctatatttaatctatttgtttggtctcctccataaccagagctttatttccatgggggctaatgctcctttaagtttctggcaatgattactgttatatagatgcagaatcttatttttttaatgaattaacagatgtctccctaaattaggcccaaatactgatcttaatcctaaggattagctaatagaagcatcataggtattaagttggacagatatggccaaactgtttaattttgtgagcttcagtttcatgtgctaatgccatatctatctatctatccatctatctatccatccatccatccatccatccatccatccatccatccgtctatctatgtctagcttgaccatcacaacagtctaaggagaagctatgcttatccctgtttttcagatgaggaaactgagacccagagacattaagtaatttgccaaaattacccaactcacacatgaaagagtcaaggtttgaacctagatctccctgactccactgcttgttattttaaacatctacaatatttacctttcagttcttgaacttaatcttgcctgagatctaagttcaagcctttcattatccacatccccccatatctaatgatagttgtggtaggcagaataatatccccccaaagatgtctgcatcccaatcctggaacctatgaatattttaccttgcatgacaaaaagggactttgcagatgagattaagttaaggatctttagatggagagactatctttgctatccatgtgaacccaatgtaatcatagggtgctcataaaggaaagagggaggcaggagtcaaagtcagagagagatttgaagatgctcaactgcttttgaagatggagaaagggaccaaagccaaggaattcactgacaccttgattttagcccagtgagactcactttgacctccagaactgtaaaataatagatttgtgttgcttgaagccactaaatttatagtaatttgttatggcagcaataggagactaatacagttgaccctcgaacgacacaggtttgaactgtgagtccacttctacatgaattttttttttagtaaatatattagaaatatttttggagatttgtggcaacttgaaaaaactcgcagacaaaccatgtatcctagaaatataaaaaaaaaataagaaaaagctatgttatgaatgcataaaatatatgtagatactagtctattttatcatttactaccataaaatgatacacacatctattctaaaaagtaaaaatttatcaaaacgtatgcaaacagagtgtacatggcatcctttgcagtggagagaaatagaaacaacataaaaaatgcagtattaaatcataattgcatacaattaactgtatacataaggtactgtggtaataatcgctgcattgccacctacattgctattgtggtgagctcaagtgtgggaagtatccacttaaaatgccatgtgatgctaaccgtctgcacatgagcagtttctctctccagtaaattgcatattgcaatgaaagttatctctttcagttctcacatttttttttgtgtttggagcaatactataaactttgagtaacacagcgggactcatacgaagtgccactactgatgctggaagtgctcccaaaaagcagagaaaagtcatgacattacaagtaaaagctgaattgcttgatgtgtgctataaattgagatctgcactgtggttgcccaccatttcggacagatgattcagcttgtaagcagacaatgtaaacttacaatatcaataagtaaagtacagtagtgtaaatacattttctcttccttatgattttcttaatattttcttttccctagcttaccttaattgtaagaatataatacatatacagaatatgtgttaattgaccttttctgttatcaataaggcttctggtcaacaatagcctattagtaggtaagattttggagattcaaaagttacagtgaattttaactgtgcaggtgattgatgcctaattcccatgttgttcaagggtcaactgtacaataggttttctgctttccttaccctcctgatgatttctgaactagttctacagagtttcctcttttcctttgcatctctccttcccactgccaccatccagattgttttcagagcggcacttcatcagctgcatcgtcaccctctgagggtgtggaagggctctcacttccacttaaggccatgccatgctaattgcctttctggctcttttctcttaaaaggtggtgcttagaaaggaaaggaatagtccatatgtggtcttagtaggacagggaacagtaggtctttacctcccttaatccgaatgttagatctcttcaatgcaatcaaggtaatgcttatttttttttggcacccacatcacatccactgctcactcaggttgagtttattgataactacaaccccaagcttttcatgtcatattaaagcaaaagccattatgagctgttcttatatctcgtagaatgtctgccatcttgtgtcatgtagcttttgtctcaggaaaaaaaaaaaaaaaaaaaagcacagtacgaattaatctctccagggaaagatttaaagactaggataataaggagagacagatggaattctgagagaaatatggcaaattctagagctaatctaattaaagggccatgggaacttctccctggcgcataaataaaatatgacaatcagtgtcagctaagaaacccttagcaaatacctaatctcatttttaaatttatcattacatagaactgttatcttttaacaaataatggtatgatgcaaaataagctgagagaagccaacagacacaggccaggcagctgcccagcctctctgcccacccctccctacatacacttcaggtggcatgggctctcccagccatttcgatacatgacacctctgtgacctcgccagcttgaaggataaaatgaaaggttcttagtgaaggaaaaaggcgttcatcttcaccccatcgtaatgggctctgaggaggactggcaacatgtagaatctggagaggagaggtcaggactggctgcagaggaggaagctgctgaggtgattagtagttctcagagagggccttgttctttccctttaaattcaaaatggcagtgcctcaaaccctctgggcttcctggaatttgtgtttaaatgtttatgtatttccaggcgaatattcaaacaatgtagctaagatgtggtaccttcaaagcaagtaaaccagctggcttccctgctatgatccccttgcacagcctggcccttcagacaggagcctgtattctgaaggaagtccttacagagcagcttggatctactaccccttaaaagaaggaggaactggtgaaattatttccattaactttaaggtactcaagaggaccacagaggtcttattcttttcagtttggataaatctggggcagtccaaaggttgccaagggaggtaggaagaaaagtttaatttgcacacttgagctttacagtctgtctgacttcattggagtttacttctttttaaattgcagactcagggcttaaatacttccttaccttcagtgacctttcctgagccctcctgttcctgataagctgcagggcagtgctttctttcctatgatgtgttgtcatattaacacacacacccagagtgattactgtgttcacttcccctggatgtgcttcatctttgttgagttaaaatcaaattgctttctacttcagtaaatccaattcagccttcttactgaccatgggttaaagttttaatttaaaattccctttcttttaaaaattagcaattcaaattcaaggtggtaaagcagcccacattctgagattgttggtgttggaaagggccttagctatcgtctgtcctgcgtgatgcttctgttgaattatctcaaggacagaatagttactactttgaacagattaggtggaatgatgtaaatgaaagtgctttgtaacttgtaggacattaaaaaataaatattattagcatttataaagatgctttttccattgttgccaatgttacttattttttcaaaactactttattgaggtcttattgacataaaaaaagctgtacatacttagctgggcgtggtggggggtgcctgtaatgcaagctacttgggaggtcaaggctggagaattacttgaacctgggagatggaggttgcagtgagctgaggttgcactattgcactccagcctgggtgacagagcaagactctgtcaaaaaaaaaaaaaaagctgtgcatacttaatacatacatcttgataagtttcaggataagtacaacacacttgtgaaaaccacctgtgaatcccacttgtgaaaccaatcattaaacatgtccctcaactcccaaagtttcttctttattattactatgattaattttttttggtgaaagcatataacataaaatctaccctaggcaaattttaagtatacaatgcagtgtttgttagctataggcattatgctgtatagtacagcatactgtacttactagcttaagctttagatattataacatgtgttttcctgttgaactcctgtcttccttcttgtgggtataaactagaataactttatagatcgcttgggaacatttttcacctcaagcggccattcctgtccaggtgtgggatgtgcaacacagtggtccaagagatgattttcagagtcacaaggacatggcatggggtaccattgactcacgttctcctgctaaggtgaaagtctcaatttgctgctagtgcatctttaaccttctctaactctcatttccctttgttataaagacagagctcagcagacttctgtcccaaaatctttggccaacagcaaaccatatttgtatggttatcttctaattatggggagtgattttcatatcccagtgatagtgataccaaaaaagaataaaagtatcctttaaattgacaagcaccatgaagtggtttgagactggctggtgtttgggacatggctttccacggagcttgagagatgggccatggatcagattactgcccactgtgacagacaacacacaatttgccatttcctatggcagtctttgacatatctgaagtcagtgctcatgtgtcctttcagccttcccttctttaggtctcacccttccagtttcttcacatgttccttatttgatgttctcctgcaatggtgactggagtctatcagtttttcttttgaggaagctccctgttcatcatttttatagaaggagcccttgttctgatatcagagagcagttcctcaagttggttgagaaagggaagtcagggagcaaaggagagttaatagggatgacatggaagaattgcagtgatagggatgcctgggaattgttaggagaacacttaggtccttagatgtctttatgttggtgtacaaaataggggttatcaaaactataaaaaccctggaagataactgaggcaataccattcaggacatagacatgggccaagatttcatgatgaagatgccaaagcaattgcaacaaaagcaaaaattgacaaattggatctaattaaacttaagagcttttgcacagcagaaaaaactatcaacacagtaaacagacaacctacagaatgggagaaaatttttacaaactgcatccaacgaaggtctaatatccagcatctatagggaacttaaacaaatttacaagaaaaaaaacaaacaaccccattaaaaagtgggcaaaggacatgaacagacacttttcaaaagaagacatacatgcagacaacaatcatatgaaaaaagctccacatcactgatcatgagagaggtgtaaatcaaaaccacagtgagataccatctaacaccagtcagaatggatattattaaaaagtaaaagaataacagatactggcgaggttgtggagaaaaaaacgcttatatgctgtcggtgggagtgtaaattagttcagccattgtggaagacactgtggtgattcctcaaagacctaaagacaggaatatcatttgacccaacaattctattgtggggtatatacccaaaggaatataaatctttctattataaagacacatgcatgtgtatgttcactgcagcactagtcacaacagcaaagatatggaatcaatctaaatgccaatcaatgatagactggataaagaaaatgtggtacatatataccatggaatactatgcagccataaaaaagaatgcgatagggacctggatggagcgggaggccattatccttagcaaactaacacagaaacagaaaaccaaacaccgcatgttctcacttataagtgggagctaaatggtgagaacacatggacatatagaggggaacaatgcacactagggcctattgaagaattggagggttgaaggaggaagaagactaggaaaaataactaatgggtactaggcttaatacctgggtgatgaaatagtttgcacaacacacctccatgacacaagtttacctacatgcccctgaacttaaaagttaaaaaaacacaaaaataaaataggggttataagcaaaatgtgtgcaacaggtggtacatgtgtaaagactgtcaagattgggttgaaaagtctgtgagagtgcctttgcagcttgcttctctgagccttaaggtgttccacctctaaaattggttgaaatgaggtattgtatggaaaaggctttggtaaacgaggaagtgctatacaaatgtcaaatattagttttttcattagttatattgttattttatgtcactgttataacattgacattctgttcagtgtttatcctggtttctcttcagatcatataaatcttgtgacttttacgaaagattcccatgaagaggaacaactctgagacttaaaccaatttttcagccttggtgctttgtataaaggatccagcactccccagtagtcctttcataaaagagccctgccattcccaagtccattgtcatgatttattgcttgcttgttgggatttcaccatctagaggtttttaatcaagaaagcctatggttgttttagtatccaaatccatgcatgttaaataatgactttttattgtctttataatgtctgccaacctggctgggtataaaattcttgagtatgccctgctccccacctccatccaaactgtatagggagtgttacttggcgttgaatattgccttggaagccagctttaattttgccctttgtacatgacttgagttttttcagagaatcagtcaggattcattcttttttctttggatttcagtgattttaccaggacatcttggtgttggtcataatatttcaatttgttttttaggagctgtgtgatcttttatttgtaggtttagtttggtttcctatttattttttcttctcaagggacatcaattgtccatatttttgtttgccttgtgtatatatcatcttccttttcattattttttttttaccttttcctttgcattttgctattttctcaagttgatattccataccattgactctattttcagctgtaactgtgcctcttgctgcttctgagatggcttcatattatgaatgaactgagcagaacacccaggcaggcatcagttggcctatggtaaatcttcctaggttatcataaaaaaattaacattaccatagctcagattaatagttggccaatagctgccttcttctccccagctcaacacatgcttgaactctccattctcctgagtaaaggaccttggaaaaacactccttaagaactggagaaggttgtattggttttagtatctgccattaattttatccacattttacagtatttggcaggtattctcatggttttaagaagcaatatagtgttaagagcatagttatggagaaaactgcctgggttttaattaaaatttttccagttgctagccatgtgaggttgggcaagctacttaacctcttgattcctcagttttcctcatttgtgaaggaggttagtaatagcactgctatgagatgaaatgaattaatatttgtaaaatgcttataaccctgctgggtacaaagtaggtgtcttgaagtgatcataagatgcattgtcaataaactttcctccccaatttctcaatcactttgctcatttcagtgggtttcacagaggtgtcattaactgtctttattccattatattgtgccagaggttgcctgatttgttttgctcataacgggattgttttaattattcatttagaattgcatccagaatatataactggctggctagtctgtgcttcttagattctgttttttttctcttcttgaaacgagaatacttgtcaatctttgatcttcagtaagtccatgatttctcaaggtctattgagtatatttctgtcatcatgtctgtcagttcttttagtactagatcctgactgatttgacctcagttggggacatgaactcatttgaaatggctaggtactctctttctatctttttacctctcttgggcttcaattcctcctaaattatgctaccactatctttttcaatctgaagatcattttctttaatagagatgaaggctgagaatttgagctatgtcattctgccctgtcttctctcttatctattatcactgtgccctagatactgggcacttccctgcctggttgactttcttgtcctgctccatttgtttgtgtgtttgtttgaagcacacctttgtgctgtccttagtatatttacaggaagtggagctcattctggcctttggtcttcttgacatttttcttattgctttgtgacccccttgggcttactcctggttgcttcccttctgtggatctttgtacatgtcctttgaaaatttctgcctttcagacagcttccttttcaatctcagaagtacttgtagatactttacccaccttgtctgccttggcattattgtactaattaatgtcttggggcacttgggaaagatacctgttgttccttaactccctgacctgggggtttggtttgggagaggtgagaagaggcccagaaatctgcatttccacaaacctcccaggtgattttgatgcacgtgacccccagatcacactcatgcctaactagtttggtgcagaagctcctaacctcttttttctgatcaagctgtccatgaagctgagttgatgagtgacctctggtgagtgcagggggactccctggggcttaccccagggtcaggtgcaatggttcttggcttgaagccagctctaattctgtgccttcctttgccactcaagaaagacaactgaatatctgaacttgaatctgttttcattataaagaattaaataactcgcagttttagtgctttattacttcctccaacatatcttccactccattactggtgtgctgtcccctggaggtgggaaaatgactcactcagcatcctttccttggctatttctttcttttcttttctttttttaagaaactggggtctctctctgttgtccaggctggagtgcagtggctattcataggtttatcataatgcactatacccttgaactcctgggctcaaggaggctgggctactcctcagcctcttgagtagctgggactataggtaggcgccaccacatctggctttcttcttggctatttttaactctagtttgacctggtcactttctccagagatttctttccttccacataatctgtaaattctgaatggctgtcagattaagtctgatgccattcactagaaaagatctttcattaggaggctctacttgaaaccaaacggactacagcacattttcaacttggaaagatttgaagaactgggaagcatgaagatctttgtacctaattcaaggcagtgatgtttggacacttcgactgtgtcgtgtttctcttagagctcttagtaggctggttattctgaaaggttggagtgtctcatagataaacaacaaacatcattgagtaattatacttttggggctcacgtttgagtattgacaactgtgaaaagaggaggtatagactccttacgagtttagtcctatgctctaagacatgtgcatttatcccagactctcgtataaaaagccagtgcccattgtgtgcagaatagggtaggactgaggccagacttcctgggatctagtcctggagctagcactaaccagctgtgttacttatctcctataaacctcagtgatcttatcttaaaaataaggtgataatgatccttacctcattcagttttggcgaggattaaatgacataaaatatgttaagagcttagaatatgtctggcacttagtaagtgctcagtgaatttatgatgcgtaaatggacatcagattatgtcagatttgtcaagctagtttttgatttttttttttccaatccctctctgatttttttctgcgtcacatctgttatatgtgccattttgaagctttgtaattttgggaggaagagtaatgggaattgaataatgtgggcagtcactgagctgttactataacaatatttgatccatagccattgggataagaccatgctatcaattgtagaaagtagcattagtaaaacatttcatttctatggcactttggagtttacaatgtattttctaatgtcctgtctaatttgaatacaaagaaaatatgaagtgcagagaaataactgattttctttttgtctcatcaccaggctaggtgtgacccgggtgtgcagcctcagcttggtgatctcacacatcatcaaagcagttctctgcagtacattgaagcacttgttgggtacacagagtacctgttgttaggttaagcattgtaggaagttgtaagaaaagcagctttgtatggccttcgtggccatgtgtatgtagttctgcctaagagcaaagttaaataaacttgtagccaatatgacaacacagcctgatgacagaaaaaaattccccagataaccttaaaactcacctagaaggagcgaggatttgtgtagtgttccggatgtccctttgttttcaccccattcctacgcccgcccagacttacctttgctgtcactggggctcttttggaggctgggaaggattttaatcctgtctggtcctttcccaagaatagcagtatgattgaaaatgtgcccacaagcataatctctgaattggtggatttaaaacaaagttgatgagagacttccaacggcaagtgtgtaaaaagaaaatatctctttaaaagatgttattgataatgaaaagctgagacccttgatactctgcacacggctagtatgggctttatacagattcagagacatccatgtgtgtcctgcttattggtccttaggctactcccgcccgcaaagtgtagcgctgtcttggtggatcctgccggaatgacacatctttttgctttgggatgattgctgggtcctggggtctctctccctgcctcttccccagccctaccctattgcacattttagtgtggcttagctctgttgcctttgtggtggttaacactcaacctcagagacaaagatctaagcaggaaggaggatctattgtgaaccggttggaagttgatttttgaccctaagaaattagttcaccttatcatcagatagagatgctatttgtacatttctccctcatacatgtacatttactctcaaaatttcctgggctagtaggtctctcaaggtggctgagagaccctagaaggtaccagtgtaccactgggccgcatccttaaagatggtgctgtgagggacagccatggaggcccatgtgcgccattgcccttatcccttgggggctctctggatgagggctttctctgtctttgtcttctcttgtcttcgaggtccttcttactcccttgtccaatgtgtgacatcttatcttttcctccatgagctccatttttctgttccaaatagctctagtctgctggtatattgtatttgttttttcttttcttttttttttttttttgacacagaattcccactgtcgcccaggctggaatgcaatgatgtgatctcgggtcactgcaacctccgcctcccgggttcaagcaattctcctgcctcagcctcctgagtagctgggattacaggcgtgcgcctccacacccagctaatttttgtatttttagtagagacagggtttcactgtgttggtcaggccggtctcaaactcctgacctgatgatccatctgccttgtcctcccaaaatgctgggattacaggcatgggccaccgcccccatcgtctgctggtatattatactcctttctctttgtttagttaaattatttctgctttgttttgatacataacagtggtatattagtctcaaccctttggaacatttttaggtcccgatgctatcatccattatgttgaagaggacaggtcaaaggaaagagccctgtgggaccttccctgtgaccatttaggatttagagtcatttggcctggaactgttatttcccagctacgaatccacctacctgtcccaccggtctgtgtctccagcctccacttctacacatggaaatcaggagaggctgcgtcttaaatccttttggtaaaatccagacatttatgacctctacctctcccatagtttaccatgcctgacccacagtagagttcttaagaaatactattgtcttttccccatttcttatttcctgtttaaataaaataaattcagtatttgtctttctagtgtgttgacatgtctcctattctcccaaattcctcaaagaccagtgcagcaatttaccaatctcattttcacattccttcagtgtaataagtgaattaaagccaatttattatccaggattgcctcatttatttcaaaataagctgtgtaccaagaaagctctattccctcagcaagagctaactccagttttaaagctcattctagagaaaaacagacttttatagtttgttttagctattaaagaccccttttaaaaaagaaataggcctttggatgttgccaggggttagaaagctagtccagagactgagaaggtaaacaaagaagcaggggaaaaactgattttgagtgtttagagtgtgtgaaatgtcacttttccccttaacctcttccttaaggaaaaggagagattgttaaagtagtgtctggtcagggcgcacacatgtagaaggtttctgtaactctagggtaaaatacagatctgttaaaattttcatgagtttcttttacttgtcagaagttgcctacagcttagatgatattttcctgatagtttgtaaacttctattgacttctctgtttttctattcgcccatacccatttattttctctttactgcattttactgtcttaggaagataaaacagaaaagcaaaacaaaacaaaaaccccaaaaaactaagtctgaagcagactgttgaataatattactttaactgatgaacagattttcctcccacaaagaaggaaaaagggagaaaattcgtagctcttctctctttttaaagactgtgctggaaaattccaaaatgttatcggaataaaggaatgacttcgggggctcagaacaactcggggaaagacactaaaatttattgagcatttaacgtcacctgccagaaatttaaaatgtgttttttaaagaacaaacatttcatgattttattgtatccttacgacagcctttcagggtatggggattatccccattttacagatgagcaaactgagacctggagaggctaagtaacttgttacggatcacccaggtgggaactgaccgaattaaaatccaacacttcatgccaggtgcggtggctcacgcctgtaatccaagcactttgggaggccaaggcgggtggatcgcctgaggtcaggagtttgagaccagcctgaccaatatggtgaaaccctgtctctactaataatgcaaaaattagccagacatggtggcacatgcctgtaatcccagctactcaggaggctgacaggaggatcgcttgaacctgcgaggtggtggttgcagtgagccaagagcgtgccattgcactccagcctggagtgcaagactgtgtctcaaagaaaaaaaaaaccaaccaaaaaacaacactttgatttgctgtaagaccctctctgtgaatattaaactggtaaacctcatacataatgatgagattagtcatctacagaagtaactcagggcttgtctgtaaacatcctatgctccaaagtgactgcagtgtaatctcaggaaggcaagactggaatgagatcgtaaataaaaaaatggacatctaatacatacattggtctcgtctgaagaaagactgttaacagagggggatggtcagtatggaattgtaaacaggaggtcaaagaggacgaatgtgttatttacacccaccagaacccagggaagtgtggtgagaagcagcaggaactcttctgtctgctcggcaggcgggcagctctgtgtggcggagacatttgcttccactattatggttgaagtcagcggccataagatcatctatagactgagagaaggcagtgtggacaagggcctcagagcacaggctctctaggggagcatgagttcatgttctccaatctttccaactaccatgcatggaagatattagaatgaacttttccccagatgagaaaacaggcatggagaagttacacttgggcaagtcaaagaggggtagagataggcttaaggccagtctaaattcagaactctcttgactacgttgctctatctctctctctctctcttttttttccttgagacggagtctcactctgttgcccaggctggagtacagtggcctgatcggctcactgcaacttccgcctcccgagttcaagccattctcctgcctcagcctcccaagtagctgggactacaggcgcccgccaccacgcctggctaattgttttttatttttttgtatttttagtagagacagggtttcaccgtgttagccaggatggtctcgatctcctgacctcgtgatccacccgcctcagcctcccaaagtgctgggattacaggcatgagccaccgcgcccggccacgttgctctgtctcttaatagtcttgtcattcctgggatgctgccatttgttttcttttctaatggatagtggatcatgaagatgggttcacatgggcgacttgaattctagagagccaggcaatgtcacagcttcctggccagtttgtgcctgttgggggattccccatctttgatgcctttgacttccagtccttgagggacactcacttccctggcaagcactgtcttggactgcatgagtgattttctattggttggtttctgaccgggcgggcacttagctccatgctggtctgtgcctggctgagatatctaagagcagctcattgccatattctgaatcccagccctcaggggagcagccagcacctctgcttcctgcctcctctggcagatggccctgatctgagagtttaagtgatagctatctgagaggagtgattggtagagacagtagcaccttattttaataatttaaaaatcataaaatatgccactttggatacaaaagcttttaagaggcacttaataaaaatgtttagttgctttccacaatgagaaaacattgttataactaaagcacacttcagatatttaagcattaaagcatccccagagacttattcttaacagtaaaatgtattgctttgttcaagatgattctgtaatggagaggcattacagaggcaagaagagacgagaattctttgtaattagtgtgcactgtttgaatgtaaatgagtacttgaaaacagtttgctctcttaaacatcctaagttttcccactgtcgtcttccataaggtattaattggtttaaacagcctctttatttgtaggcagcacaaaggttaacttcagtccagcccctgtctagttatcatcaactccaaatgctaatgctgtttgaattcatcagacagaattgagctttttgtatgtagtcatggcctcttaaaacttacaaggccaggcgcagtggttcatgcctgtaatcccagcactttgggaggccgaggtggatagattacctaaggtcaggagtttgagaccagcctggccaacatggggaaaccccgtctctactaaaaatacagaagttagccgggcatggtggtgcatgcctgtaatcccagctacttgggaggctgagtcaggagaattgcttgaacacagggggcggaggctgtagtgagccgagatcgtgccactgcactccagcctgggtgacagagtgagactcttgtcaaaaaaacaaacaaacaaaaaaccaaaacttggaaagtatatatagtgtctctatatgaaatgagactagagaaattttataaaagaagggtcctcaagtatagataaaagacaactgtattttattataaatgctttcttatatctcagacccaggtaagttacaggtcatgctcagcacctgcccccgtgcatatagcagcaggttgttgtaacatcagcttattgagaatgtggatcactataacataggagtcgtgttatgctgttcttttaattccctcataccagtgcactacattccaatactaacatgtggaaaaaaaatactgaatatccccttgttttttagtaagaccatagagcagaacatttgcaattttataatggttttatttttaaggtcaggcatttaaagtggcacaaagctttgatgtgggcttacatctgagtattataaacatttagcacaaagtaagaacttacttaaaagatgctccagcttccagtgtgctgtttctgtgtgaaatactgaaaatttgggatcattttaaaaataaacacttatctaagttggcatgcaaaatggagcatttagaaagccatgaaaataagcccatgcataaaatatggcattaaaaaggtaactgtgaactttacagatggactagcatgaaagaagctgtcttttgctagggtggatacgagagtttgcagctctttgctgcaaaaaaataagagcagaaacttaagttgtttagttgttttgaaataacagctacacagagggctccttctggttcatccatattttattagggcagcagttaaaaaattcattagagacacccatctgtagctagcagcacccttgaggggggctcagatggtgatcagattttggagtagcactttacactaaaagaaaaagacaatcgtttaggagaattaatagcacaatggagaggggctgcttgatgcatttgaagcatacccttccacatggtttatgaatcttttgctactgaattcctcagccacctgcttcagttgggaaagagagatccaggcataacaaggagagaaaaattggatcagagagttgagactgtattggtcagtggagaacatagatagagtgtctatgtgatccgtgttgggctctcactcgtgtgtgtttgtgtgtgtgtgtgtgtgtgtaaatcacgttggcctcctggggaacttcatcagtacaaaaaaaagcttgtggtcagagctgaggctgccctggtttaccttggccttgaactccacctccctggtggtcaggtccaggtgcctttgcctcatctttattcatgaattgaaaataactctagttattgaatggcaatggaggggaagtgacctctcctctaccctcctagattccctagctgggtctatgaaattgacaacagatagattaacaggagaataggcatagacatttattttttttttttagaaggagttttactcttgttgcccaggctggagtgcaatggcacgatcttggctcactgcaacctccgcctcctgggttcaagcgattctcctgcctcagcctcccaagtagctaggattacaagtgccctctgccatcataccctgctaattttttgtacttttagtaaagacagggtttcaccatgttggccaggctggtctcgaactcctgacctcaggtaatccgcctttcttggcctctcaaagtgctgggattacaggcatgagccactgtgcccagcccatttattaatttttaatattatgtgcatggggggcatcacaggaaaaaatagtaaataccccaaagagcggtgagatttgagagcttatatactgttttcataggggaaggggaggaggatataggttgtgatttttagaaatgtgctgttagaacagcagatggaagataggagagtttgtgacaaagtttgtctgggtgtggtgtcgactcctagtttcatctcctgcaatacaaatctgtcttccctggttgatgaaacttccaggaagggaattcatgacaactgagttccctttggcacatctgttttgggcagataaagggagtttagagaaaacctttccctgcacttgctgtttttcaagtgccttcagctcaaaataatcaatattccaaagcagcatagtttggagtggcttattttggtttccttcagtgactctgtgccaggcatggtatagcacggttaaagtcataatctcatctatccttccagcaatcctaggggtggagtcccatttcacagatgagataatggaagcaacagagaggttagtcacctgaccatgctcactcataagaggcagagctgaatttcatcttctgctattaagtccaggtccataaactgtgtgcatatacatgttttttttagataaactttctattttagaataattatagatttatcgcaaagctgcaaagacagcacaaagttcctttcacccagcttcctctaacggtaagggcttatataatcatggtgcatgtattaagactcaaaaatgaatattggtgcaatgaactaaactacagatcttattcagatttcaccagtatccttttcctgttccccgatccaatccaggatcccacactgtatgtcacatgcatggtttttgacccttaaacacgaagtgggctggatgtcaaactgctgggtggcctgtttctcctcattactgatgaagaaagtgagacgctggtgccatctgtcaccttccttgtggggcccaggactctcattgtctaatggaaaggggaaatcctatgtagggtagaagatttagaacagaggcatggggacaaattttaaatatagaccatactttttctacttgtagtagtttgtagctaaaaccacattcaagaaatagaaaaagattgggggagagagagtattctgcaaagcaacaacctctctagcatcattaaagtttatgatgcatttgaatcccaagtgtactaggatgttaaataggacttttccttaaaacaaagccttccagtcctgactgcctcctagaatcacctggatagtgtcaagaagcaccaataccggaggcccatccctcgatgttgtaatttcatcagtcttggttgtgatctgaacctcagaatttttaaaagataccaccatgattttttttttttttttttgagacagagtcttgctctgttgcccaggctggagtgcaatggcgtgactgtggctcactgccgccttgccttcccgggatcaagctatcctcctgggcacatctaggatgcatgtaatttgcctgtattctgtgaccaacccttctgtgaacaccccctctgtgaccaacccctcctggaatcccagtgtggtttccttggatggtttctggtcacttttttcgcaagccctcttcttctttcaggatttaccttcttaggcggtctcatttaaccctcctggctttcccacttgcatggcatgtgtttccacctctctgtggcccaggtcctgccttggccctgtcctctcggtccccacctggaagccaccctgggcctattcccatcctgtcttctgcctcttcctccacagctgccacactgtctgtacccaagtcccagtggttctgaacttcttcaagctggctgcactcaacactgcctttcacactgtgcttgctgttctctccaccggcaatgacctcaccctcctttttggcttgggaagcctcagccttccagtttactttcctggcctcctgcagtggagttgctcacagcctggtctgcatctgcttgttgacatgtctgtcttccccagggagccatgagctccattgaggacagggaccatgactttgaaaaattaataattaatttttagagatggggttttgctaacttgcccaggctggagtgcagtggctattcataggaggaatcatagctcattgcagccctgaactcctgggctcaagtgatcctcccagctcagtcttctgagtagctgggactacgggggcatatatgcacccaacttgaaaaagtattatcaaatatttcacggttataaaaactgtatttatatataattatgtgtttaatatataattacacataggttttacatgtgctgtttgaaaataatacaatcagttcctgtgtaaccaccacttaagaaatggaacattacccttgaattactatataattgcatgcattttttcctatgtattgtttgagaataatacagtaggcacctgtgtaaataccagcaggcttaaaaatggaacattaccctcgaggtcccttgcacatcacgtcctgttccctgttaagactggtttatcattcttttgcttttgtttatacttttagcacgtatctatctcttgtgctaaaagactgttacaagcagaacagtcattccagttttagtgattctgggctgagactgtagacaattaaataaaaagccaattcagtgtaggattcatgccttccgactgtgaggctgttgtaaggaagtagcgtttgtgggaatgccacccaggagtcaaatctctagcctttgggtgatcaggaggctgacaggaaaacagcgacagagctttgcctctggtggaactcctggtggcctgcagacctgttggcgtctgtacctgcagtccactcagctttccagatgactgaaatgccccaacagggtagagtggctcgcctctccaagaaagagcagttggtgaataatcatgcctgggaaaacaatccgcctggcaaagagatggatggtatccgttggtgaatgtgatggcagcaagcccagtgcaagattctgtggcgattccttgattgacctgctcggttggtggattttgaaagggagtgggaaggactgcttcacttgcgtagaactctccctctctcttgcgctatcttcatatcgatgtctacctttctctttgtgtatatgtgtttataaatatttcatatgtatatttgtgtacagacatatacacatttggatttatatttgtatacattttatattagtcagttttcatcctgctgatgaagatatacccgagacttggaagaaaaagaggcttaattagacttacagttccacatggctggggaggcctcaaaatcatggcaggaggtgaaaggcacttctttattttatcttattgtattttttttttgagacagagtctcgctctgttgcccaggctggaatgcaatggcgtgatcttggctcactgcaacctctgcctcctgggttcaagcgattcttctgcctcagcctcccgagtagctgggactgtaggcgcctgccaccatgcccagctaatttttgtatttttagtagagacagagtttcaccatattggccaggctggtctcgaactcctgacctcgtgatctgcctgcctcggcctcccaaagagctgggattacaggcataagccaccacacccggactggcaaaaggcacttctaacccaaaagtccacagtccaaagtctcatctgagacaaggcaattcccatctgcccatgagcctgtaaaatcaaaagcaagttagttacttcctagatacaatgggggtaccagtattgggtaaatacagctgttccaaataggagaaattggccaaaacaaaggggttacagggcccatgcaagtccaaaatccagtggggcagtcaaattttaaaactccaaaatgacctccagatctcacatccaggtcacactgatccaagaggtgggttcccatggtctggggcagctccacccctgtcgctttgcagggtacagcctccctcccagctgctttcacaggttggcactgagtgtctgcagcttttccaggtggatagtgcaagctgtaggtggatctaccatcctggggtctggaggatggtggccctcttctcacagctccactaggcggtaccccagtagggactctgtgggggctccaaccccatatttcccttcctctgccctagcagagattctccatgagtgcccagcacctgcaacaaacttctgcctgggcatccagccgtttccatacgtgttctgaaatctaggtggtggttcccaaaccccagttcttgacttctgtgcacttgcaggctcaacaccaagtggaagctgccaaggcttagggcttggaccctctgaagccacggcccgagctctatgttggcccctttcagccatggctggagcagctgggacacagggtactaagtccccatgcacacagcatggggaccctgggcccggcccacaaaacctttttttcctcctgggcctccaggcctgtgatgggaggggctgttgtgaagacctttgacatgccgaggagatgtcttccccattgtcctggggcttaacatttggcttgttgttacttatgcaaattcctgcagctggcttgaatttctcctcagaaaatgggtttttcttttctgtcacattgttatgctgcaaattttctgaacttttatgttctgcttcccttatatatctgaatgcctttaacagcacccatgtcacctcttgaaggctttgctgcttggaaatttcttccgccagataccctaaatcatccctctcaagttcaaagttccacaaatctctagggcaggggcaaaatgctgcccatctctttgctaaaacataacaagagtcacctttgctccagttcccaacaagttcctcatctccatctgagaccacctcagcctggaccttattgttcctatcactatcaggcttttggtcaaagccattcaacaagtctctagggagttccaaactttctcacattttcctgtcttcttctgagccctccagactgttccagcctctgcctattacccagttccaaagttgcttccacatttttgggtatcttttcaggaatgccccactctactggtaccaatttactgtattagtccatttttatgctgctgataatgacatacctgagactgggaagaaaaagaggtttaattggacttacagttccacatggctggggaggcctcagaatcatggcgggaggtgaaagacacttcttacatggtggcagcaagagaaaatgaggaagaagcaaaagcagaagcccttgataaacccatcagatctcatgagacttactcactaccatgagaacagtatgggggaaattgcccccatcattccattgatgtcccactaggtcccctcccacacaacatgggaattataggagtacaattcaagatgagatttgggtggggacacagccaaaccgtataagatttgtattatttttatatcacgcatgtgtgctcccccaacagtgttccttcatgcacatggatggtggtgttgaaaatgcactttctgttggacttccaattttaggccaagcttaggcccaggttgttgaattaataatgaataaatctagataaaaatagaatggtggttaccagggactggggcagggggaaatggggagttaatattcaatgggtaccatgtttcagtttgggaaggtgaaacagttcttcaggtgcatgatggtgatgattgtacaacaatgtgaatgtacttaatgccactgaatgatacattgaaacacggtaaaaatggtaattttatgttacgtatatgttaccacaattaaagaaaagtaaaaaaaaaaatcatagggaaaattcaatggaagcctcaggaaatggtaggggaggtcaattccaaaaccacatacattctaaaatgtcagaaatggtcagttagcaaagtaaggattaattagattttacacttgtatgtctttgttgacatttctgggaataaagagagaagagtgtgataattcctcttctatgtcagttctagaaccttctctttgttccttaccctggtgcttgtatgagtatgtacaaatgtgtgtgtgtgtgtgttgtgtttgcaaacatggacaatggcgtgtgggtttgctactctatttctagtatttctgtgccaccttattaataggagagctgtgggatcaggcctctggatgtaaccctgtccttccttagtgcttctgagttcaaactgactaactcacaaaatgcgtctgcatcgggactgacttgtggcattcattttctcaaagggcaaaaaaccttttgtttctggtagaaattaaagatgtgtttgtgacggccctcacttctttttcaccaaatgcagcacccttcttccctttaatccgatgaggtggttttatggggtggcacataacttggagctcatgggaggccttagaaccattaaccaactgagctaaccaggttcctccattagtttaatttcaaattgaattctccttcctccatgattgaaagagtacattcaattcctgtaacagtttttatatgcctgactgacatcccttcctaaagcataagcagtttgagggcagggatggtgtcttgtttatgtctgtaccccatgtatcatctagtgttcaataaggaattgttttatggaaatggattacatgattaaattggaaatagaatacaggttgatttattccacccccagcttgccttgctcactggatgcttattacagtgacctgaaggcacttcagaagacttaagtgctctctgaattattgaaggaagatggactttggctcagtagagtgtttgtgcttagtgcctattactggattctgattctttggaaacaaattaatccagagggatatattgtttctttatggttctgaatatttggttagcctgaatgtattaagatcttacaccccaaccatgacagatgggattaaaattccttccctgaaaagaatatattcctttatgcttccactataaatttatatgcaagtcatgttttgtaaagtcgtgttcttctcttgctatttggtgcattccctgcagcattctcgaggtcccagcattttcccttcaggagaccttagaattattggggtacggggcagccaagtgacctgcccaagcccacgtgtcttttttttttgttgtttttttgagacaagagtcttgctctgtcacccagactggagtgcagtggtgtggtctcggctcactgcaacctccgtctcccaggttccagtgattctcctgcctcagcctcccgagtagctgggattacaggtgtgcaccaccacgccaggctaatttttgtatttttagtagagatggggcctcgccatgttgcccaggctggtcttgaactcctgacctcaagtgatccacccacctccgcctcccaaagtgctgggattacaggcatgagccactgctccaggaaaaaaactgagtatcatgttttcttaaactgcatgtttaagatttcatatttaaaaatgaatattgtctggccaatgtgtattttaatttcttctctgatatactgtaaactaggattgttttaggaattataaggacctcaggaaacttctgtgtagtataaactggaaacaattcatatccaccacagaaaataattaacagtgctgggtgttaacaatacttaggggggaatgagtgatggagggaatgagtgatatggacaattggtgaagccctgttgactgggtgatcaggagaagggagctgatgggggagggattggaagctgaaggctgagaaggatttggatagatgaagggagaacataagagggagggctgacaggattcttgctgatccggctggttaatattggcttgccgcaattttccttctaagctaggtaaacatatatttccaggcatcctatttggactgtgtatagagacccattgacatctgggtctgttctaagctgctttcacttccctccaatcagagcttgttgggctcaataaggtggagatgggggtcatatattaccagggcaagcaggtctgtgcttcagagaggaagtaaggcatcagcgcttccctctagaattgatctgttgcggaacaagagtcctcgagcagcagagaaagctgcgccaggctccctttccctgctcagtcgttcgttcctggactagatgggtggaacgaggcatctctgggtttcacagagcacagagggcacggcttgtttcctaaccgggtctcaaaacctgcctgcactttgggctttttcttcaccttgccatatgttgcttcctgcccttttgaacctccttccggagctgattgcacttatgtgctaggaaaggagtatttgtcttcaaggtctgaatgcatcctaatccttattgaactgcaaggtgtgatggcacgacttggatatgtaagtgagaattgattctggtcacaggggatgtcataagtttcctcaaaaaataaaaaagaggaaaaaaatagtgagaaaaaatggcctttcgttatgggaaactgggagtttttcctacagatttcattcttgccttatatgggtttcctggaattcttctagcagattccagcagtgccctccggatctgccctctgccctctgagggttaggattcatagtgtgtgacagtctttgctattcaggccaccttctgggaaggccagtggccaggggatggttttcatgagccctcagcagggtgcagaagccaggtggttcccatatctcattcccacttttggtaaacacctctcttatgtttgccctcctgggcttgttgcttctggtccccggctcatcacagcttcccagggccccggtagaaacaagggttcacagtgggtaacctcactgtgctgcaactggaacctggcttgcaggatttcaggacctttggttgagtggttttagaaaaggctactcaggggctgggcgcggtggctgtggctcacaactgtaatgccagcactttgagaggcctaggcggggggatcacctgagatcaggagttcgagaccagcctggccaatatggtgaaaccccctctctactaaaaatacaaaaattagctgggcgtggtggcaggcacccgcaatcccagctacttgggaggctgaggcaggagaatcacttgaacctgggaggtggaggttgcagtggggtgagattgtgccactgcactccagcctgggcaacaggagcgagactgtctcaaaaaaaaaacagaaagaataaagaaaaaaagaaaaggctattcaggctgaagtgccctcaggccttggaaaagaaatgaaatttcaaacaaattattttctacctagcctttttcttttaacttcagaagggttatctggatgactggtatttacatacaaaaaatagttaaaagtctttttaaaccacagacagtataggtttcactggactcatttttcaagatacgaaattgttgaattgttttcctttggtaattgaagccagaattcagtgttttctctaacttcttttcggattctttgctctctggagaacgttttgcctgctttgcaagggggtatgagtagtgcgtgtgcctgagggcctctctctgccccctcctaacgcctggccaccctgttccgactgctgcccctgccggtcgggcccggacactgcagggagcctcacatcctcggatgacggattccttctgtacatctcatcacatccttttctactggcttcaacttgcatggcctctgtcttgaagaaagaaagaaaaaaatgaaatgtttcttctgccttcctgtcattttacgcattttacgctgatatacttgtaggcaaagggaattgaaagggcatgcactttggaacgagacaagcctcagttcaaatccgggctttgggaaaccatgatccgggagttctggggcaaagtaaggctttctgagctttagctgtattattggtaaaatgggaatagtaccgatctcctagggttatagtgttaaatgcctcccttcctttctttactctgacttcttccaccaccacctcatggtccctgcttccattcctcccttccttgcaagcttccggaattctttgtaccccgggcagcaatagcccttttggagctccccgcaattggcaagagcaagtcactgtgtgagcaagtcttgggctctgttatcttcagatgctcaagtcaggaaatagggggctagaggtcattgtgctcatttccccagagattatcaatgccacccccaccccttttaggagatggcatgtgccatgatcgtagctcagtgggatccttaatgcctagtgatctcggcttaacaggacaaagattccaagcccatgtctgttctgggaagcaaagcaggatgtgtgggcctggagtgaagtttgttccatttctcgccataggccatggtatgattacagctgtgcctagtgctgcctagttttactttcatgcctgatttgcaatgtggcagggtcctgagatgagagctctgtgtgggccagtagagtcaagagactttgtcctggtcacttggctacttgcagggggttctggaaagtcaagttctctgaatctcagttgcctttaatataaaaggaaagctatagtttcgggtcggattgattcacatggttttggtcgggagtgaatgaaattaatgtaaattaaaacacattatgagtagcaaagtgctatgcaatctaaaaataataacattttaatcactcttatcatcatatgtgccaggcactgttctaagctgtctacaaatagtaactcatttagttgaatgctcacaaccaccttatgagagagctactgttaatatcaccactttactgatggggaaactgaggcacagagaggttaagtaacttgtggaaggtcacacaaccagcaagtggtacaatcagggtttgaaccagtcaatgaggagtcagcatttgttattgttcctattcctatagcatagctgggaagggaatgcaatgctggtttggagaacacatcaagcaggcctcctgtcatccactgagtgagatgagatgatggccatacattgcggcacagccagctatccatggtctgcagcaacagatcagtcttgcagggacatggatagctccgctagtgaacattcacatgttcaacgaatagctagagtaaatagttggatctcatttagaggcatgctctggcattcctctttcacgtcatttgctttccaggcccactccaggatgagagtactgaggtgccataaaagaccaacaggcaagatgttggagggttcaggagctgccaaggttgtgttcatgctgacctgttggcatagcgtacagcagtgccagctgctctgctaaaccgaggagctgagatgctgtgttgatttctacatgttccaggcaaatacttcctgaggattgtcaggatttacataatggattggccctgggaccactgagccagcatctatctttgacaggtgtactgagagatgacctttaaacctagggatgttctccagatgcagttccagctgggccagtaagatctgcatgtttatggtgctgttttttcttttcttcccaggcagccgggattgcttaccacctgcagcgtgctttcggaggcggcggctggcacggaggccgggctacatgagaagctcgacagggcctgggatcgggttcctttccccagcagtgggcacactgttccggttcccaggaggggtgtctggcgaggagtcccaccactcggagtccagggccagacagtgtggccttgactcgagaggcctcttggtccggagccctgtttccaagagtgcagcagcccctactgtgacctctgtgagaggaacctcggcgcactttgggattcagctcagaggtggcaccagattgcctgacaggcttagctggccgtgtggccctgggagtgctgggtggcagcaagagtttgcagccatggatagttctgagaccctggacgccagctgggaggcagcctgcagcgatggagcaaggcgtgtccgggcagcaggctctctgccatcagcagagttgagtagcaacagctgcagccctggctgtggccctgaggtccccccaacccctcctggctctcacagtgcctttacctcaagctttagctttattcggctctcgcttggctctgccggggaacgtggagaagcagaaggctgcccaccatccagagaggctgagtcccattgccagagcccccaggagatgggagccaaagctgccagcttggacgggcctcacgaggacccgcgatgtctctctcggcccttcagtctcttggctacacgggtctctgcagacttggcccaggccgcaaggaacagctccaggccagagcgtgacatgcattctttaccagacatggaccctggctcctccagttctctggatccctcactggctggctgtggtggtgatgggagcagcggctcaggggatgcccactcttgggacaccctgctcaggaaatgggagccagtgctgcgggactgcctgctgagaaaccggaggcagatggaggtcagtgtctcttccacctctgtggcccgagattgtcgtgagctcagattagcactgggcagacggcaggaaacgaggggttctgggctcaactgacttcctcctggaagctgcagcagctccttttggagccggctgcacaggatgttgctgcacttctgtctctttgaattggacacagatctactctcctttttgtcttctctgtcacttaggtgctcagatttgctctccattgggccgcaggctcctctgcaggccccggcttaggtgagacgtggttcatgcagcccagctctgctttgagacaggaaactgggggcaggggagattgagctgggtgatgtttggaaggacttgagagatacaaaaatggggatgccctctatcagggcgatcctgctcttcatccgcttcactcattcccttccatcctgctgcagtggctgctgccttccacagggtcgggagacttcgcttctggtcattgaacctctttggctctcagtttccgtatttagagataacaccaactcataggattgttctaaggctcaaatgagaatgtagctgctttggaaataagtacaaactggagacatctaaggcccagccttatgatgatgctgtccatccagttatctgagaggtgggtatagccggaagtaggtagggttcctctacccacaaaagttcccagagaagcccaggtagagatgctctgtggctcatctgttgccagactgtattttaatcctggtgtgtgtgtgcatatgtgtttgtgtgtgtatgtgtgtgcatgtaggtgtgcctgtgtgtgcgtgtgtgtgtgtgcatgtttgtgctgtgtgttcatgtgtgtgtgtgcatgcatgtgcgagtgtatttgtgtgtgtgcactcatgtgtttctgcgtgtggtgtgtggatatgttcatgtgggtagggaagtggagcacccactcatcaggcatttgggaggagtaatctgcagaagttcatgctcattccccgaaagagcatctcccatctgttctttatctatagtctgatgtttctagccctgtccctgtttgccctgtttcagccctcagggacctcagcccagccctctgatttattatgcagagagggagtgaggtcagagcacagatgcaggcttgtattctgggtgatgtgtggagtcttccagttagtcattgcctaaaccagtgccccttgtctttccccgaaacccgttctgaagggcctccaatattggttgatttgaatgcatagaatctatccagtttcttaggccagaaaccacaaccatcttccacacctccctctcccttgttccacatctggctggcctccaagccctctcagtcctactgctaatctgtctctcatcaccatggccgctgccctggctcagatccttgttatctttcacctgggttttgcaagagggtctaccttcctgcggtgtttctcttctccagttaattaaactaaatgtgatcatatgtgcaaagtgcttcagacagggcctggcatctagcaagtacccagaaattaaccattgtcatcattagagaaatagctccaatttagagagtttgagtcaaaagcaaatgaagctctcccttctgtccatagctcaaattaaattcctatcttatctcaaatggtagaatctggacacactttttctttagtgtaagtattgttgtctatggcagtcccacagctgggcagggaaaaacatgacactctcttcaattacactcatgtactgcataatgacattttggccaatgacggatcacatatatgatgtgacagtggtcctgtgagattatcgtactgtgtttttgttgtaccctttctatgttcagatatgtttagatacaacaataccttaccattgtgtgacacttgtctgcagtattcagtacagtcacatgctgcacaggtttgtagccaaggagcaatagactattccatctagcctaggtgtgtaatgggctacaccatccagatttgtgtaagcacactctacgatgttcacacaatgatgaagtcacctaataatgcatttctcagaatgcatccctgtcattaagtaacgctaggctgtacttgagtatctgttgtgtgacagcggaattaacagagtagtgggaatgacagaaataacacagtccagggcataggacttacaggaaggcagagtttgcctcaataggaggaagaacctcttgacagtgggaattgtctgtgatgaggtgggctggtcagggacttgttttcccatggtgcttacacagaggccccagactgctcactggggttgcggctgaggccttcgggacagggcagaaggtcggtgaaggatctccaaaaagatcctttgaaagagtaggatttctagtgtttgggggccttattgatattatattttaattccttaacctcctctcgcttctacttaagtaaaaatgagaatctcaggaatttaagtttcagcttcttctaaaagatggttgatcctcagtgtttgtggattctatatgtgtgaattcgtctacttgctaaaatttgttgttaactccaaaatcagtactcacagcacttttatggtcatttttcatttttattttattttttaagagacggggtctctgtcttccaggctggggtgcagtggtgtgatcataactcactgcaaccttgaactcctgggctcaagcgattctcttgcctcagcctccctagtggctgggactacaggcgcatgccaccatgcctggctaatttttttttttttttttttttgggtagagatgagggtcttgccacgttgcccaaactggtcttgaactcttggcctcaaatgatcctcctgcctcagcctccaaggtactgggattacaggcatgagccaccatgcctggtggtaattttgaacctgcacagagtggcaaaatatttgggtcacctgatgtacacgctttctacttaggtcaaacaagttcagaccagatgacattctaccttctctctcatactacaaactagtatcctttttgtggtctatttaatgccatctttttttacatttttgtgctctttattggtgagttaaccattgcaaaagctccctaagcatagtgctaatgtcatctagtgctcctaagcatgagaaggctgtgatgggcctgatggagaagatacaggtgctccagaaactttattcaggcatgagttagagtgctgttggccagagtacaatgcttatggatcaataatacatattaaataagatgtttttaaacagaaacacacatagaacaaggtcatgtgttgaccgatggaggaaggtgttgtgaccaggggttcacaggaacctaccctgtatttctcttaggagcaatgcttcattattccctaattcagtattcacagaaactttatagaacataactacagtactgtgaataaggagaatcgactgtgaatattttatgctgtttagaaatcgctgcttagcgagatttccaggggttgcatgggactgagaagatggtaataaaggtagttggtgaccaggcatgcagaggaggggaagtggagtgggccctgcaaggtaggctccacctaaggccatggaaactggtgaaaaatgaaggactctgcctgtagagtattataggacgttccacaggcagggttgtggcacagtgcaagacatggccactggggctgtgcctccagcaaagacgggtattcagacatatctcagggcagtccattcagggccttatagagatcactggacgaggtgggcatcgtggggtgggctttggctgtaaatgaatttttttcctgaccttgtttcctgcatttcttcagcttctgttctaataaatgtttaatgataccatcatttgggtgtggcgatggtaatgctatagctttatgtggccctcaaaccattcacacagcctttcttctgtccctaatatataggactaagttactggtaaactttgcagttgtaatatagaacaattcaaagacaaaggggttaatatgattattcattcattctttcattcattcagaaagcatttatcaatgacaacgagtacaatgccttatcctaggctttggagattgtattaggacaggctagtaacaggcactacgttagaggctcaacacaacaaaattgtgttttttgcgtatgcttcatgttccacagagatttttggggggcaagaacccagcctgcaccatctgaacatatgatccccttagtcacagacttgaggaagagaatgttagggagtcctacaagagcgatcaaatgcttcagcgtagaggtaaccccatcactgccactcataccctgttcagcagaacaaggagagaggcacttgtactctttccatgtgcccaaagcagtggaaaatcaagtcagtgtaagtactagcatcctatacatggatgcaaaatagttcttgccccccagatgctcaaggttgaatgatgtgcacagataaaaccaaacaaaggaaaatgatggctataacctggtgcaataagtactccattcttccagtgggtcagaaaaaaaaacccaaaaaacaaaaaacaaaacaaaccttggcatcatcctggtgcattttcctcagaccccacctgtgatgtattagcaaatcctgttggctctatatttaaccagcggtcttctgaatataaccggaatcagatcacatctcaccatcttcaccattgccaccatcctcactatcatccaagctcctgtcatctccttcctgaatgttcccatagcctcttacctggcctcccttcttctgctcttactaacagcagccagagtgaaactgtttaaaacataagtcagatcatgtgctcctctgccccaaactctccagtggcgccccatgaacttcagagtaaaatcagaacttttaaatggtcttcatgtctcttcttgacacagtcctcattacctgtgtgacctcattctctacagttttcccttacatcaatctgccccagatccagtggcattcttgctccctcttgcttttcatttcactttcacttcttgctttcttaccagaaacacttctgcctgagcctttgtactggctcttccctctgtgggaatatttttctcccagacagcctcgtggttcactcccttaccacttttaaatctttgtgtaaatgtcaccatctcaaggagatcagatttcaaattgcaacctctaccctctaccagcatccctgatccccataacgtggttctcccttttcctttttcatagcattaatcacttgctaaggtgccataaaacttacagttgacccttgaacaacacgggtttgagctgcaagggtcacttatatgcagattctcttccacctctgccacctctgagacagcaagaacaacctctcttcctcctcctcctcagcctactcaagatgaagatgatccactttcacttaatgaataggaaatttattttctgttttttatgatgtttttcgtcatctagtcaatgctgaatttttttctcaatgatttttaaataacattttcttttttccactttacttttattgtaagaatgcatatataatacatataacaaacaaaatatgtgttaatcaactgtttatgtttttggtaaggtctctggtcaacagtagactattagtagttaagttttggggaagtcaaaagttatacacagattttcaactgtatagggccggggttggttcccataatccccgttgttcaagggccgactgtattatgtttttgcctagaatgtaagtctggagggctaagcattttatgatgtatccttgttacatcaacacaatacaaacagggcctgataactaagaggcactcagtaaatatttgttgaatgggtctatgaatagaagaagcaagtacaggtcacaatggaggtatagaggagggacatttaacacagactggaggagacgacacttgtgctaggggttgaaggaaatgtaggtgtgagccaggcaaagaatgggaggaagatgtttttcagggatcaagcccaaatccattcattggtaggccaagaattcattgtcagtaaatctttgggtctcctgttgagaagaacaatgattgtattagtcagttctcatgctgctaataaagacgtacccaagtctgggtaatttataaagaaaaagaggtttaacggactcacagttctacatggctggggaagcctcacaatcatggtggaaggcaaaggaggagaaaggcacatcttacacagtggcaggcaagagggcgcttgtgcaggggaactcccttttataaaaccatcagatctcatgagacatattcattatcatgagaacagcatgggaaagacccacccccatgattcaattacctcccacgacatgcgggaattatgggagctacaattcaagatgagatttgggtggggacacagccaaaccatatcaatgatgctaaatcaacccattggtaacactcagagaagtaactggatcactgagtctccatgtgggttaaataagactgcccttttctgtaatggaaaatatttgaaccttagggcttctcagaagggttttgtgagagctttgccatcattcttactcaagccttcaggacagcctgctgagcttaagttcatgctctttttctcttggtttctctgccaattttggtgtgtttaccttcataatttaaatgtgaggtttagaacagagaccatttggtcaggaaatttgtattccttctcattatgcatttcttcatgcagatgagggcacagtgtgatgtttttgtttaaaataaaataacattttaactttttatgtggatgttatgctcaaattacactttttctttacatagattttttttggagaaactaatgcatctggcattgaaaaaatgtgcatttttgttttttttttaaaaagagaatgaagaagttcagttttgaaacagtttctaaatgttcttagttttcacaaaaatgtttgcttgaattctattgtaattttttattttttcccctttaaaccaacataggtaatatccttaagattaaaacttcagaaacttcaggaagatgcagttgagaatgatgattatgataaaggtgagttttaatttgtttattgattgttttgtcatcatgtcccaattttctttccatctttactcatatctaccttttgaatcccaaaagaattgtacaatctgttcctctgatcatctctaccagggaatagttgactcttttacagcattattgttttgtagatttcaaagtacttcatgaacattaatcctttgggttataaatataaccttatcaattgtccagaaacacttagcatactcacacaataaaaattatattagcttgccacctgtctgcccatggtgtgatgtatctataatccacttgttcataaaaaatattcgtctgacacctatgatatgctagggaatatgggagacaataggaaagtaagacagacatggtatctgcccttgtgatgccagtaaacttaagccttcatggggctctctgacttcataatttccagaaccagagataggaaatgaggtgaatttgagaaatgtcagactgtgccaaagggggtcacatgcatcaaatttccacatacatggcctaaaatacccaagagaaaaagaagttacaacattagaccagagatagagggactgatctgaggccaggaaaacaaacaaacaaaaaaacaaaaaaaccaattaaaatgaggcaccaaaatagaagttgggctgcaagcagatgagggctgacatgggggttgaatgggcacagggtagactgagtcaaaggaaagctttcaggtatggttgtcctgggaacaatcctgaaaactttagatgctcattgcaagatctcacacccatttctgctgggtgtgggaaagagaaagggctgaaaatgacatgtagattcccctaggcacctactaacttgatagatactcctgctattgagcaagttaggacacccaggattggtatggaaatggaatgtaggtttaaggattcttctggaagctggttagctttaaggcatgggtcttcagcatttagcccatgtgacattctcattgtatgtgtcatagactgttggaattagggcactatgggaataagataagtgatttccaaaaggaggtagaaaatcctgttctaggaaatgctgttgcatgttctcattacctatccattgcagttgggtttagaaagtcacggggcatgggaggaagggagaaaggactggagacagaggagggactcttgacattctcccagtcctccttctacaggccacttgatttcataataacactgggtggaggatgagttgcctgagagaggaggcaagtcggaggcaggggaaggcacccctcaagcccagcgtcagtggcttcagcccgggcacagctgtaggcagggagaaaatgagctattcctgggccagggctcacctgctggatttcatctatgagagataattacagctagttttgaagctgcccactattgcacagatttatttttattaccatgaattgagtcctggactctctacctttaatgacactgtaacacataaagcttacaatgcagtgaaaaagtaggccaatcaggccctagtttgtcccctgctcctgcttaggacctggtgaactttctagacttggttctctcaatggcttcattaaatggagacctcacttctttaatcttttctccaaacattccgcaacacctaagggaatggggtttgagaggatacacctcatcagggaagctcaaagaatacaggcatcttctttagtgtttctgcctttttctgttcctgttggtacctcactacttactacatcagaagtttcagggtgggctcagcattctgtgttttcccaagccttcctggtgactggggtgtgtcctgaggcttgagaaaacactggtgcagagtttatgctagtgagcactaggcctggggggcagcagccagccaagccctggaagaggggttgagtctatgggttgtgtccttcctgatccaccagaaatctgtgcagcagacaagcatcctggtaggcacaggacacacgatttacatgccactccccttgtcttcttcccaatcccacagacccgattcagtgtgttgagaggtaaatgttcttgtggaatatgcacaatgcctggcatataggaggcaggccctcagtaaatgtggtgtgagggaattaattaataaatgacttgccctctgaatgcatggaggctatggatggcaagctagagtgaatgaggggaaagcactcttgccacctgaaggtgggcttagttctcagctcatctgcagtgcccaggatggggggtgggagtgggtgaagggaaagatctttgcatagaaattggcttatgtgaaaaatatctattaagtatccatcgtatacaacagcacttctcagactttaatgtactgtgaataacctgggttggtaatggattaaaatgcagattctgggctgggcgcggtggctcatgcctataatcccagcactttgggagtccgaggcgggtggatcacgaggtcaggagatcgataccatcctggctaacgcagtgaaaccccatctctactaaaaatacaaaaacaaaattagccgggcgtggtggcaggcgcctgtagtcccagctactcgggaggctgaggcaggagaatggcgtgaacccagggggcggagcttgcagtgagccgagatggcgccactgcactccagcctgggcgacagagcgagactccgtctcaaaaaaaaaaaaaaaaaaaaaaaaaagcagattctgattaagtaggactggggtggggtgggagactccatttctaatgatctcccaaatgatgcgcatactgcgagcctgtgagccacacttagagtaataatggcatataagaaatcacaacaacgccgtgtttaaggcatgctgaatgccgtcctcaagatctgcatctcaaggagtatgcagtccaggaggggaaactggataatacacagtaagaataataaagctatacataatatgtcccttaaaatacagacagaccaaggcgggtggatcatgaggtcaggagtttgagaccagcctggccaacatagtgaaaccccgtctctactaaaaatacaaaaaattagccgggcatggtaacaggcacctgtaatcccagctactcgggaggctgaggcaggagaatcgcttgaacccgggaggcggaggttgcagtgagcagagattgcaccattgcactccagcccgggcaacagtgggagcgagactccatctcaaaaaaaaaaaaaaaaaaaaaaaaatcattaaaaaaaaaaaaataaaggcagacaaagacagtcccaaaaagggacaaatgacttctgccagagatcttggggtgggtgaagaatcaaagtagtggaggaggaggcagtttagatgggtcctgaaggatgggtttgatgcaacagacgggggattccggcaaagagaagagggagaaagggcactgttaccatgagccaccatcccaaagttaggcttgaaaggagacttgcggctgactatggtttgaaatggatcacaaaagggctcagtacttggacttgtcagtgattggtaaattattttaaattgatcactaagtcattaggaaagtttggaagacataaaggtagtgaatttgttatgagatttgttcaaataagatttgaatacaatttcttctctcatatagtttattgagggtaactattaaacattttaagaattgttgagttttttttcatagtttttacttgaatttgctcctttttctctgttaggagcagctgtgcagccctgttctgtctcaggggaaggggtctgccggaatctgagaggtttgccagaagaaatgagagggtgaccttatctcccttggtttttgctgcttttttcttttgctctttctttctttctagtttcactcataaaaatgactttgtgttccaaagaaagaagcagttggcacagagtagagagttccatgttttatctcatcaaagtgctggcaaatttccccactaatgccttgtgggaaaaccttctcaggctctaattacatctctccatcactagggaagtaaagttaatatttccttatattcttgcataaggtgggagggcttgggagaaaaagaataaggctttcattaatagcatttacatagcgtccttctccaagaggattcattagattcattgcattaatgcctatcccgtgcttatggtcaggtgaggggcaagtttgagacctcagagtcctgcagagagaggaactgtggtcagtactggagataaggattccagctctgacatgggtggggcagagaaaaggtgggcgtgggcaacaagtttctatgtggttactgttctagttgttcctgcacctgtttgtgctccataatatccccctggctgctcgtgtcccatgtccaccagtgaccatgctcacttccacttccgatgtgagcaaggagagattgtgaaaaggaaggaacacaattttgggaactcagcatttcagtgacttatatcaatgtgacatatagagcagctggcttcactctgcttgtttagaatttcctttttggagtaaaagtagccagcatcatattactttctctatcctttgtctcaactcatatccattatgacagaactctagtataataaacatttatatacaatgacagacattgaaagaaaaatgatggtggcagaggccaagcataaaaacactctagggtgagtcttttgtctaaattaccataatgtccctttgtctgaattatgtcttgagcaagatttctctatcctcagtttctcgtcactgatggtgtgcaaattacccaaccagatacccctttccttcacagggaacctgccttacacctcccatagggtttggtgtctcagtggcttccaggagcctggcagttagaaccagaatccctgccacataagcgttgatgtgactgaacacagcacaaccccagagatttccttttccctgcgtttcattccagtctagaaagaagaaaacaagattgaatagaatcggccattcttatatcctcaggactgccagaatcaatgggatgtggatgccatctgggggcccatggaacataaatgcttttcttggcagcctgtatcattttgctttctgacttaaaaagtggactgcaattgaaatctgctcagagagacaggtccagcaaaactgtcactttataatgtctgcacagaaaaaaagcaaacatgaccaccagtgcaatttccacctgcagctcccttgaacaaggcacttctctccctgcctgcacaccaggactttggagtgttcttgtctgtgctctatagagctttcccttcctttgctgtgagatctgcttgctatatcaccttgtcctggtatactaacaaaatctgctgattaaaacccaaatcaacagcacaaatctcaagtatgtgtcatgagactcactacatccttagcacctatgaaaaatgccaacacttagacctgcaaacacaaatgggaaatgctcaaagtcaccattggctatgatctctgcccttaatttacagaattgtaaattctcctgcaaacaagaaaagaagctaagatagtgcaaccaagtaaaagaaatgcattttatgtttcctctttttatgatatgtttgttttattagatagctgctgctctggtgccaatcataacatcaaaagacacaatcctgaatgccatcatcctgaatgttgaaatctcccaaaattaaatccctaaaaccccaaattcctaaagtctaaatccctaaagtctaaaatccctaacatctgcaatcctgaaaaatcacagtcctgaaagattaaaatcccacatgctggaattctgaaaaccaaatgtggggaaaggatttagtgagttttcagttgtgtcatgttagttgcatcatggtaggtggaactattacctttttattgtctttatttggaaattaggtatggtttaagaagatgcatataggtgcccagctgacaaggggtggacttgtggacttaattttaagtgtcaacttgattggattaaggaataccttgaaacctggtaaagcattattttgggtgtttctttgagggtatttccgcggagattagtatgagtctgcgtgtactaggtagggaagatctgtgtttaatgttggcaggcaccatccaattgtcaagggcccagagaaaacaaatgtagaaggcaaactggtctctctctgagaaatgagacagactttttcctgactccatggacatcagaaatttgactgcatgaaagtgcattataacaacgttgactttgtgtgtaagcactgtgcgtatacataacaatgttgggatttcctcaatagatgaagagatgtttggacatcggcatttgtgaaaaataaaatttcttgagatctctgctctctgggtggctgcatacgaccccctttgcaggtctgttccatggtgggcacattctcattcgttgcctgattacatcacgtgattactgtgggaagaattgtcactatcattggttttcaattgaggtcacggaatctgctgagagggaggaccagctgtgtgctctggccactctgtcaatttgtctcccatccctactgggtctagagcattttgtgtcccactgtggaagactgagctttgtagacagttgaggacaaaacttagctaggaagtttctgacttctggaagctcttatttacatgacagtgaggaaaggaacagatgagcgctctacacttggaggtagcaggaaaattttccacaattttatctaaaaaattagtctatttttatctaaaaaacaaatgctaattaggaaattagctcttgtgttaatcttcagcattgttctcagaagagcataagcttgtatatctgcttcctcttactttaagtaaaaacttaaaaattgggagatgggctatacattaagacaaaaataccataggaagagaatatgaacaaaatgtcatttatttagtttggttgcattgtcttagcttctcttcctgtttacaggagaatttacaattctgtaagttaaaggtagagatcatagccaatagtgactttgagcattgcccatttgtgtttgcaggtctaagtgttggcatttttcatgggttctaagggtgcatgcagtgagtcaagtgccacctacttgagattttagctttgtgcacagatgcgaaagcttattggcacctgatgtacttccctctcattcacagcataaaatgtgatttcacggtgatgccttttctccttggctttgcatctgggtacacgcttggctctttcttaggtcttggtaggatttcttggaacccctgcagctctggaggtagaagcacagtggcatgaacattccttcctaactgccatgtcgtggtgtgtttctctctgggaatgggaccatgctgctttgccttccctgcctatgaggacatcagtctgtcctataaggatcacgtggaatgttgtcatggtgcattattcatgataaactctgacagcttcaaggttaggtgtgatgctgaatacaaaacaccaagccaagccaaaagaattttttttctctcctctatgtcctctccctaaatggttcttagttgaaacttgtacatgatttcctactagctgagctgtagcaggaagttgtgccaacagtggacacatcttattcacgttttatgcatctgcctatgagaatctgtaagagacacaagctgttcatgttgtagagtccggttgatgaagcagaatgtggttcaggaagtctctcttgcgcttagaagactgattttgaagctgctctcataggttttctgcttcttctgccctcttagagtggctaggaggctgcctgggattccaggtaggtcttggccctaagacctcagctgctccatagaaggtggtcagacaggatgaggcagtgacttcgatcatctggagcctcacacctgtaatcctagcactttgaaaggctaaggcaggagaattgcttgagcccaggagtttgagaccagcctcggcaacactgtgaggtcccatctctacaaaaaaatgacaaaaacaattagccaagcacaatgtcatgcacttgtgttcccagctactcggaaggtggaggtgggaacactgttttagcttgggaggccgaggctgcagtgagctatgattgtgccactgcactgcactcctgcctgggtacagagcaagaccctgtctcaaaaacaaaaacaaacaaacaaacaaacaactcaatagaaatgaaaaggatgtgctaatgatgagatgcaaacccccaaattgacatgtaccttcccattacaacaattttaggtccaaactatgcatttggtgcaaatggttgatttatccttaacaggaaggatgtcttagtctgcttggactgccatggcaaagtactactgactgtgtggcttaaacaatagaaacttattgtctcactgctctggagattggaattctatgtcaagttgtcagtagggttggtctcttctgaggcctgtctctttggcttgtagacagctattttctccttgtgtcttcacacagtcttccctctgtatgcattggtgccttaatctctttttataaggacaccagtcatattggaataggatgcatccttgtgacctcattgaaactgaatggacctctttaaaggtccagtctccaaatacaattaaattctgaggtcctgggggttagaactccaacatatgaatattgcagggggatataatttagcccaaaacaggaagcctaaagggctcaggacagagctaaatactaaacacattcaggtatttccacaaaatttgaataatttagtttgactatctgtggtcattgtggtcatatgtagacatttgattgaaacttttttttttttaaagcagactttttgacacaagtaagttgattcttcccacaagtgaacttagctgtttttcacattttgttttattgcagagcctggctcttaggccagtatatcatggtatcccttcacacaaacaactatctactgaatatctgccagatttaccatgccatggtggacaaactatgcataaaaaaatagcccaccaccaaggagtatacagcctagttggaataaaacataaatagtacaaatatgtgaaacttcagctaccattagaattgattttttttttagaattgatgtttatttttgtatgaggacatatttctttttttttttttttttttttgagacagagtcttgctctgttgcccaggtggagtgcggtggcgtgatcttggctcactgcaagctccgcctcccgggttcatgccactctcctgcctcagcctcccaagtagctgggactacaggtgcatgctgccatgcctggctaattttttttttttttggtatttttaatagagacggggtttcaccgtgttagccaggacagtctcaatctcctgacctcgtgatccaccgaccttggcttcccaaagtgctgagattacaggcgtgagccaccacacccggccatgaggacatatttcaataggcagagacacaaattaacctagtaccagctgaaaagaggacttatgatctggtgtgaccagaggtggcaagagtgatcagaactaacatgttcttcacttttttctctgtattgtggcttattctttcaaacctcttgttttagttatttattgctgcatgtggtaggctgaatgatacccatccctccccaaagatacccacatcctactccttggaacctgtaaatgttaccatatttggaaaaggggccctgcagatgtgattgaattagagaccttgatgagggcatcatcccagattatctgaggtgggtcctatatgacatcagatcatgtctgagagacgcagtgggagattggaccaattgaagaggaggtggtgatgtgaccacagaggcagggattggagtggtagctccaagctaaggaattccagcagccactggaagctggaagagacaaggacaggattttccccaagaatgttgggagggaatacagtctgtcaataccttgattttagctcagtaaaactgatttcagacttctggcttctaaaactatgagagaataaatttatgttgttttaagcctgtaagtttgtggtaattagttatagcagccacatccaatttatatacggcataaccaccaaaaaacttaaagcagtgtcaaagagttacgttagcaaaatggtagagtttgcagctccaactttgtttccccacagaaacatcaaaaaacaaacagaaaccattagaacaaacatgatcagaactctggaaaataggcaaaagtttaagcaaccaagcaaacactgaataaagaaaaaggccacttgaaaatggtgggaaactttgtagcatttttatttgctcttgtcccagccttctctctagcaagacagttctcttgatgatgacagccttcattcccagtgtaggaccctggtccctgattacagagggactagagaagaccttacttattgtggatgtctgttctaacctgtctgggggctacgttaagtactgacataggcatgtatctctgcttagcctaacttagaacataggctggaaaaatggcaggcattgcttgcaaatgctcaaagtgagctaacaaactgcaaaaacctggggcaaaagattactggttgaggtgtacaatagaccatctaaagtccaggtgcaaaagctggaagagattctgtgggaaattaggacattcaaaagcaccatgtatacaggaaaatgtagaaatccatgcatatacttggggcaagatgcatgctcagaaaagaggagagaagaccctaagctttcatttcaggctgatccttgagttaagtgtaaggttgggtaagtattgtaggagttccccagcacagagccaatctgcaaagactgggaaaggaagtttggaaaagtatctacaaatggactattatagccatcaaaaataaaaaacagcaaaccctggggaagggtgagagtccgatagccagagtttacattataatatttaagtgcccaatgttcaacaaaatatcacaaggcatacaaaggaaacgagaacacatggcccattcaaagaggcaaaataagtggacagaaactatccctgagaaagcccagccatcaaatttattagacaaatactttaaaatgattgtcttaatgatgtccgaagaactaaaagaaaacatggacaaagaactaatggaaaccagaaaaacagtgtatgaacaaaatgagaaataaagtgatagaaattataaaaattgatcaaacagaaattctgaagctggaaactgaaagctgaaatgaagaatttactagagggttagacagaagatttgagcaggcagaagaaagaatcagtggacttgaagatactacaatggaaattattgagtttaaagagcagaacgcaaaagtaacgaagagaagtaaagagaactgaagggacctctaggacatcatgaagcagatatatatatatatatataggagatatatatatatatatatataggagatatatacatatatataggagatatatatataggagatatatatataggagatatatatataggagatatatatatataggagatatatatataggagagatatatataggagatatatatatatataggagatatatatatatctgctttcactgttgttattcaacattgcactgcaagttatagtcagagcaaaatagataaaaggcatcataatggaagggaacaagtaaaattatctctatttgcgattgacattatcctatatgtagaaaatcttaaagaatccacaagaaagctgctagagctaatgaacaaattctataaagttttaggtgtgaaagtcagtcatgtttttatctacctggaatgagcaatcccaaatggaaaataagaaataattctatttataatagcatttaaaataataaaatacttggaaataaatataaccaaagaagtgaaagacttttacattaaaacatgtaaaatagattttaccttgaaacatgtaaatagagtttacactgaaaaatggaaaatagcccagaaatacacccatatatctgtgtccagttgatttttgacaaggggtgccatgtccattcaatgggagaaaatagttctttcaactgatggtgctggggcaactggattttcacatccaaagaataaagttggactcttgtctcacaccttaaacaaagtttaactccaaactgtgcaatgattatggataaaagtttggtggttcttcaaaaagagaaacatagaatcaccatatgattcagcaattctactcacagatatgtatgaaacagagacagagagaaagagacagagagatggagatgggggagagagacagaaagagagaagagagagaaacagagagagaggagagagagagaaagagatagagaaagagacaaggagagacaggcagagaagagagacagaaagagagagatagggattgagagagagagaaagatatagggagagagagagagagagagacagaaggagatggaggagtctctttcacacatatgcacatacacagtatgctggaggaagctctatcatcttttatgaatctatcttaagaaattatgttgttacttccaccacatggattcatttgaaacaagtcatcaaagttgtcccatcttcaaggggagaagaattagaccatttttttgatggaagaatgtcaaagaacttgtgggcatattttaaaatgatcacaccactttattccatgtggcaattgaagacttttgaattaacaacacacgactagagaagaaaaagagacttcccctcttggatccagtatgaaaaccttcaggaaaggattgggttaggtgctgactccttggaccaatgaccataaccaaagggatgaggtactgtaattagccaagcctggctacctgtctgtctctgtgatgaggtgggtacatctgttaggagaagatgggggaactggtgcagtgcagataaaaatagtagctagtatgcttattgcctagtgaaacatgcacacacgaagcaattaggaatgattgagagcagcatatgaatttaaaaatgagggatgttaaaaatgcataaagaagattaaaatgaaaacactccttacagagttcattcatttggtcaatacagtcatttccatcccaaaacctggtcttacatgttagcttgaaggtgcctcttgcaacagattttccagagacttttgtctgatctttactgggaccaaagtaacctttgattgtctctgactgtggctgtttttccgggagctttatgtgctgggctcaggaaaagttcaacccatcaataggttatcacatatatatactctgggactgattggaccacattttctcactgaattgactgattgatgaattcagttggcagaattaactcttctatgtctacatgaagtgccatttagaaataatcaactcttaatcagcctgggatagtcagtactaaaagcaccttcatgagctgtgaaaaatttaatgcatttatttacatatttagttttaaattttagtatattgttagttgaggtatagtttccaaacaaagagccgtgaaatgtttagtaactgtctctgtacctctggatgaggacagctcagccgggaatggagggggactgggtgaggagaccagaatgtcagtgtggccacgcagcacacttttgttttgtcttctgtccttgagcactggcttgttcctggataaactaggcataataatacctatcctgctgtgtgggtggaaggttaaatgtgataatgatgtgtgtgagatgcctgcacagtgcctggaggtattgaagaattatttgctgccttttctttttctacctaccacttacccgctacccccgggtgctacatgttagaaaacactgtgtaaagtgtggatgcttctgaaaaatctccctgccagcagttagtgccaatagcgtgcagaaaataagatgcaatgatttggcttcttttctgtttggcaataagaagcttatttgcacatagcctgatttctttcaatctgcaaaaaaaaaaaaaaaaaaaaaaaattggaaatgaagtaaagcaatatatattaaaacatgcaaattataaagaagcatttaaagcttgactactcttcacattgtcgtatggcaaactattttttttatctgcagtctaaatttcatgacctagaatctctcgttttctgcctgatgctttgttgcatgacattggatgacattgagaaaatgaaattgaaaccctgcttgggctttgaaagaactggcaatcctgcttttaagagtggaaggaaaaaaaatggaaagggaaggaggaaaatgggacatacatggaatactaaagacaagactgaagaaagagaggttgaaagctctctctcttctgattatgtttctgtgggtctctactgttttgtggccttcaccctcatgggcagagaaggctaaggtgtaattctcaggtaaccatttaatctttccatttaaaatggtcatttacaaacatggagtccatttcctttgcataatggcaacgagatggcgcctgtgctccttcgtggaattccttgctctgggtgatggactggacagctaatttgtttttataaagtgtctgggcacttaattaaatcttgcatcctgtctaataaaaaatcaatatcaaatccactaccaacacgttctggatggcagagaggcatgccagaagaaaatcttgagtggcggttccttccagatttagcaagctctgcagtttgtgtttggctgttctctcatcctgttgcttggcccagctcctattcctaagtcaatgagggcttcaaagcatggtgtgaatgcatcagctgctctagaggtcctgtctttgggagatgaattgtggcccattaaaaaaaagttctctagggaaatgtgaataagtttcctgcaagtctcggaaataaaaacctttatggtatataaatatttgaaggttaacaaggtcttcagttggaggaaggcaggcccttggcagaaccaaagggcatctcacgagtgggtagaaagttataggagggattggtcttttctgctttggtgttggtagtggtagctgggggtctctaggctgattgtgtatgatctggagtctggagccttgctacagtttgaactggtcagaaaagccaaggcccgcctccctctgctgactctgtctcactgagccataggcgtggggtcctgcattggccatttcagttttgcttgttgatgaggaaaggtagatcaagtgggtcaaggtggcaagggtcatgtattcagagtagggactgagtggagttggaaaataagcagcagtgaagaagagagatcactccagcaatcttctcactgccaaaagtctccaggtcccatagactgagcaccattcaataattctatgtgttgtatgaacgcatcagacaattccacaacctccttacttcatttgcctgcttgtcatagtgcgagaattgctttcattgtccatttgtttcttgacagtcaaatctcttcattaataaaaaaaagacttgaattcatggcaccattttattttccaatactattgtatagaatgtccaaactaagatctaaagactatctttttcccaccatccctctagaagttcctgatctttgttatatctcagcccagctcctcttgccatatcccctattacaatgaatggcaagtcaagcagaaaaaagcctgtgggtcattgtggactttcagctctcccgggacatgagccactacaccttttcgattttatctcttaagtatctcttccttctgtcctttgatctcgtaagtgttgtctggacacacgcactcgcctcttaatgggtccttggtttctattttcatccccctccaaagcatccttcgatcatccttcaatccctttccaatcatccttcatgttgtaaccagtcttctttctaaaactcatttacaattgcttttctacttcatctctctgcgtgactaatgtcactatcaggacaaatgttaaatatggcctgccataaccagcttcttgccctggcccttgcttagctttctaacttcatttcttgccattccttccccacttcaagcaactttctctctctttttttttttttttttgagttgcagttttgctcttgttgcccaggctggagtgcaatggtgcaatcttggctcaccacaaactccgtctcccgggttcaagcgattatcctgcctcagcctcccgagtagctgggattacaggcatgtgccaccacacctggcaaattttctatttttagtagagacggggtttctccatgttggccaggctggtctcgaactcctgacctcaggtcatctgcccgcctcggcctcccaaagggctgagattacaggcatgagccaccgcacctggctgcaactttctctttagtcccttggtagttcccgaaggcatactgccttgtccactgtttagtacctctgcctgcacttaccacctccttctcctactaggtcatccagacttggtttctggttggtcatggtgtggctcatgccacaatcctagctttttagaaggctgaggtggaaggacttgaggccaggagttgtagaccagcctgggcaaatagcaggaccccatgtctataaaatttagccagacatggttctgtgcatcaatagactcagctacatgggaggctgaggctggaggattgtttaagcccaggaggtcgaggctgcagtgagctatgatcacaccactgcactccagcctgggtgacagagcaagaccctgtctccaaaaaaacaaaaaagacttggtttcagtgccccttcttttgagtgcttggtatattctctatcctcatacatattgtgttttagcatagctattggctgtcctcttggctaaactgttagcctcctagggaaagaaagagaccctattcatttttactctttatccccagaacttagcatagtgcttggtcaaagtagcctctcaagaagtggttgttggatgaacaagtgaattcatcttattatcacttatcatcttattatcattgttacattattaatagctgataattctactaacaatagaattataaagcattagcgcttttcaggtcaaccttgttaaaaacctgactgcaaagttcaattctgccatttgctagctgtataagcttggacaaattattctttctaagctttattttttctatctataaaatgggataatagggttgtttggagaattaaatgagatggtgcatgctaaatatttgggttatgtatcattcagaatgaatgtttgttaaattatactcactggtaaaatatttaggtattttagatctgctagagataggctttttaatctctttgtgtttttttgttcaaatgtatttgcgaactgattattttcttagataatcattttcttagataaccttagcgcacctaatttgatgcctgttgagagtagagagaaaccaaaaagctcacagcagaaggactttttcatatgtcacagtagacaaacaaagttattttccgtcacagccatgtattgggtggaatgacctttagtagctgatgacagcgatgtagcagaagggacagttttccacttgacctttatacaatgtgccagcttgtctcataacacaaaataagttgcaattgacaggcttgatagaacactaacccgacaggagacagacactgaagcagcccctgtttgctaccgagcgtggcaacttccatatacccaagggtgccttagggatgactactccctaagtcatggccagaacatttagtgtaattagttcctctaggagtttattgtgaggtgagatttgctcataatgaattttcattgccaaggacttggttactcgcaggtaccccactatagtcttttgacttttctgtctttgtaagctgtcttcctctcctctttgctctttgcttttaccataggatgttttcttctttactctttttaattttttttctttaagacagggtctcgctttgttgtccagctggggtgcagtggcatgatcatagctcactgctgcctcaaattcctgggcttaggcgatcctcctgcctcagcctctcaagaagctgggattacaggtgcatgccaccacacttggctaattttaaaaattttttataaagacggggtctcactatgttgcacaggctggtcttgaatgcctggcctcaagcgatcctcccacttcggcctctcaaagtgctgggattacaggtgtgagctgctgcactcggcctcttctcagcttttctaatgcttcatttttgccgttccctaacttgactacttttagttttctaccactgggtgatttttttcccttggggctttctgcatgagggctaaaatgtgaagttcttaagtttgttccttctcccagatagtcacagggcagaagtggttctgagcagcaggtaggaaacgtgttgtcgtttcgtttacaggtttgttggaggaagttgctaccagtcatctcactttgcatacctagttctgacattgactgcattaataaccacaggtaatttactttacctctgcaggaagtcactggaagggttacattttcatttggggtgaacagcaactgtggatacggatcatgaaaattgacaatggaaaatgggcatgccattctggaacttttcccagcttttttccagagccaggtctgtcctgatgtgagaaatgatgtcctcatctgccaaatgagtacaataacattagctctacctaccttgctgggctgatgaaagaaacagaggaaataatacatataaaaactgtgctgattgaaaggagctatgtcaacatattaattcaggctgtccctggttggagtattgtggataatgttatctgctttttattcttttccacactacagatgagaaaaaaaaagaaaaaaagtttttaggagagaaaaaattagaagaaaatgtttaaaaatactctctggaaagttagaattctaataaaatccttagtaccacagttgaggatttggcttcatgctccaagtaagtaaatctggctgagattaatatttgatgcatatttatgaaatcagatatatcaaaactgtatcaaaagatataaatcttttatttttcttaaagaccttatacaatgaaatgttcatttatatcatatggacttggggcagcaacaaaaacttggcaacctggggttgctgatatttacagctgttcaacattttttggatccatgtattctcttcagaacaccagaaggctgtgcttttcaaattgtgttctgaggagcctcagagatgccttagggaaggctgaaagggaagcttcatccagagtactttggtttccatctgttattagtccagtaagatttcatctcaaaaagggctctgttgctaaaaaaaagaaaaagaaaaacaaacaatgaaaaaaaatcaagaagtaaacaaaaattcttgaaaagcactgccttggctgggcacggtggctcacgcctggaatcccagcactttgggaggtcgaggcgggcagatcatgaggtcaggagattgagaccatcctggctaacatggtgaaactccatctctactaaaaatacaaaaaattagccgggtgtggtggcgggcacctgtaatcccggctactcgggaggctgaggcaggagaatggcatgaacctgggaggcggagcttgcagtgagccaagatcgcgccactgcactccagcctggcgacatagcaagactccatctcaaaaaaaaaaaaaaaaaaagcactgccttaaggactttcaaaaatggtatctcagatatttggaaactattgttgagagaaaggaagagattcctcccaaatctgggcttctttttcatgtttgatagaagcttgaattttgagtaaaaaacacagtatgctagagatgcttaacctggaatgaccatggtatttgatacaaatgaggttctgtagaatgcggacagctctgcctggactgctctatgaaatagatctttctacttatccacactcgaacaagtgtgtccagcataaacatcacagtgcttcaaatactgttagtcccagtcaaggatgttattctgtgtccattccactcagaggtattcattttcttcttggcagctggaaccaattgctttggatccaccatggaagcctcgacatcctgaaccaaactcctattaatgaaacttcccaaatttaaacaaagcaagacaaatagatatccacacagcgtagatcatgacttctttagacatcatgaaaagaaaaagaggacccacgtggaagaatacgctcatttatgatcagggtagcatcatattcctctcccttttaacattatttcaggatagcagctgtctggatgctggccatgggcttgaaaaaaaccaggtgggcatttctgcccactgtaccgtttctcccatgcgtttcccagtcccctgtcatggcatgaaaaaaccgctattgttctgtgttgggacaattagatttttgtaggggggagaaaccacccaaaagcaaatggaaaaatatgctatgattaatgtcagttacgggaattaaacttcggaggcctttaggacaattatgaaggaatcattttccccttggtggcaatatgtactacagttgtcccttgatatccatgggggattaattccaggacgcctgtggatacagaaatccacgtgtactcaagtcttgttttcagtggatatgaaaagtcggccctccatatctgcaggttttacacttggcgaatgctgtatttttgattcatgttggattaaggatctggaacccctgatacagactgtatttattgaaaaaaaagtctgcctatgagtagactcacatgttaaaacccgtgttgttcaagggtcaaccataactgcaggcagaacatctgggcaggaagctcctgcaggaagacctgtaaactcaggtctgtggaacggcgatgatcttcttcccttgcttccagaattattgctgtgagatcaggtgcactggctacgaccttactctttgtgcagaacttatttctggtctggtttaagtgaacgttattctttctgtgcagtcctgtggttacatcaaaggttaaatttcatatagcatgtctgttatatcagacttctctgatggcctgtccagagcaaacattttaaaatattggtcctattctgtcttataacagtctgctctggtgatttttgtctcatcaattggattatgacactgtcagccactgttagtgttattctcaaattcagtcttccattcatctctccttcccttccctggcagacagacttctgcagccactgggactgttggggtgaggaaaggcaagaaccgatgtttcattctctccctcccttcttcctccctcttttttgttggttgtggggtgggctacatcttcttacccaaacaaccaggagcatttgttggcaagtttattgtgcccagtgccgatgtctggacaattaattccctaggtcagtggctttcacagtttgtgatggtgactccaggaaggaaactcaccatgaccctgtatatacatagaacaaaaatgcagcccactctgatattgtatttgttctattctagttcattaaaagtgaatgttggtcttcatcctttaaatggatattgtcacctgctaatagattggaccagtattttgaacaatggccttggtacttcatttggctttgcatgctcaattgtcatatcctctgtgtggggaagggggcagggctgcttccctgggctgtctcctgggatgcccaggggccctgcctgcctgcgtgggtccttggggacctagaagttccggtttttcatgaaacagcggggctctagaagagccttttcccttatcctgactcttccaccctgatttcttcccgaggacttcttactatgtttaaagatggcagtgaagtggcctgtgggttctagaaccctgcaaacaccgccccaagtgtgataccagtttacccttcttgtagacatccccaaacttcaaggtgattgtcttgaagcccttcacccaggagagggaaccagcgtacaataaccgctgtgctgcaggagaggggaggtaaagagttgtcacagccttgagcctagctcttcccccaaaggcagtctctcttttcttcttccttcctttagtcatctgtgtatagacacagatgcaaacttttcctggaattcctaatcttaagcagtcttcaataggagacctggcttcagagtctgtccttaaacagtgaggtgccctgtgtcttttattcttaactgtggcctatctccactcaaattttggcatttggcgtttggttgtcagtggttattttacattctcaagtgtcactgtcatttggttagggtagttgtcagggtggttctgagagccaagtgtgtagcatagctttgttgttacaaatgaaaaggccagttcccatttaaccaggtactgctggctttctctacaggatttggtctacatccattagtgctctttgttgtccatgtcactataggagagattccccgggacctacagggtcactgtctgtttccaggatcagtgagtcactccctcgtggcctgttatggctttgtgtgaccacagagagggtcacggtggtgtggaagcagggagggggagtcagccctcgctgtgcagcaaccacagtgacgtccccagtgatcaggcttcgtggggatgctcaagtccctcttgatgatcagctctagtgattctcatgttctgcacgcacagaatacatcctggaataatggtggtgaggtaggaaactggcaagacttattttgtgttcacaagcctcctgacccaaacaggatctggtccagacagggtcaagtgaagaaactgacgcaaaccagcagatggcgacaaaagccatccctaactgcccttattgctcattagcataagacatcccaccagccccatgacagcttacaaatgccatggcaactaccggaagttactgcccctttcctaggaagttctaaataacccacccctcaatttgcactagctcaccccttaatttgcctgtaattgaaagtgggaataaacacagttccgagagcccatatgttgctgactctgcattgctgcctatgagttagccctgctctgcgaggagcagtacgcttcattaagatgattgctgtctaacaccaccaggtcgcccttgaattatttcctggttgaagtcaagaaccttcctgggataagccccagtttgggggcttgcctgtcctgcattgttggtattttccgtttgctgagaaaagttcagttagtgctgcctgagctggctgaaggcccttctgggctgggtccatatgcccaagagggtgacactggctggtctcgggggtggtgtctttgagggaatgagattggtcctacgagtgctggagaaactgcacactgaaatggtgtagcctagcattgttagggagtggcagataggagcaagaagctgaaagcagggagcagacaggaaggagcacatcccctttcctcctccagccttgcagtctctttggagctggcagcaaagtcagaaacatggttggtctacagaggtccagcctcagcatcacaaaacagaagataaaaagatatgtttagaggggagagacaatagcttaataacaggcacagccccaaaataacattttgcttttccatgttatgaaccaagtgagagataacatgaaggcatgaagaagatggaaatctaaatatcagcatcgttcctgataacataacattatggaatgtggcttgggtatatggcaacagtgggcttcctaataccaaaccccagaacaagaattgcccatgcagctgtgggcagtgatgagctgcaggcaccttttttttgaggcctggccttgtaaacctgagtttctggaggagcagagcaaatgagtgctgcccaaggtcacctggcctccaccaaggagggagagaggaagcactgagttacacatgctcagtcttaggtcccagtttaccagtggggaaattcagtctatctccctggacaggtgaaagcagcggggcaacagggaaagcccctcctcatggatacctaagggcagggaagacgggctgtattccctccctacataatgtaaaagacaatattctcaaaagcagttgacacaacaggggccagttcttataaattgatagtatcaccccagaatgtgtttgggcaaaggcagttttataagtggccacatgatctggttccatgacatgctgcttaactgctctgtcttaattcaggaagtggttttagaatatcaggaaaagagagacggatggactgcatcatctttctagaaatatcatatccataatcacatccatgatctctctcttagcctatgatggacaaataagggtctgcagtgagattttacccttccctgcaagaatctggggtgtaactattcaggattattcattaagagagggctctcaagctaatagaatcaaccttggattaaggctggcatagtaatgcagtcagtacttggtaattagcaatattctgattcttttcttaaaacaccagctcatccctgcctgctcctgcttgtcttcaggtgtctgcaagatgataaaatggatgaacatagcacatgattatccgtggaatactcagaaactatcatctctcgtgttatagcttgctttttctctatttttcatggacacctgtgcttctcactctaattttacattgcacacctataatggattcttattttctgctactgatatttttgctagtgtataagatagaatttcatatatcaacatgtcccagtattcctcagagggcttaatgacttccaggtggttcagaaccactgatgcctggggccctaaagggagactgctgcatgtcctacatgtgtgaatggaggacagagagcgagtttaggacagggggcagggatggacattttacattttgaagaagtaaacactgggcaagactggccattaattcctcctctatttgaccatcctctgggtgttgggactcactgaatataggctgagtttcagagagacgccccttgagtagaattaaatctgaatcaagaagcaattaaacccatgacagcaatctcttggaatcatttttacttttgtaacaactcttctacttgtgtttttcaaaactcttcacaggcattcttttctcaccattttacaataatctggtggcatgagttggcctagtgttatttttcatatgtgagatgagtaaagtggctcttagaggggttaaatagggcctggtgtggtggtgggtcatgccttgcaatctcagtgctttgggaggctgaggtcggaggatcgcttgagcccaggagttcggggctgcagtgagctatgattgtaccaccgcactccagcctggtgacagagtgagactctgtctaaaaaaaaaaggaggggtaggggggtggtaagaaaaaaccctaaaattatattataagattgtttaggatgaatccaggactaaaatctgggtctcctgactcttaagcagataaatcagttttaaaacttgatttttttttcgtatgctagaggatttcatacaaagatggaggaatcacgctgcatccctttggtgtttacttgatcattttattcctctttagaggtttatctttaggatcacatgttgtgccatctatgatgttaatctttaagatgctagcttaaagcattataaagccaagatttgttttttaaagtgtctaaagagaatgtctcttgttaaagtgagactgtcttctcattttacaaatcctaactgccttttacagcacacagtgcggtagatgttcgggaggcagccgccaacaaggcacaatcgcccactgtcttcaggggcctctggcttagtcctcatgctcctggatagcacctaccaggagttcccatctgggtccaggagttaggctttaatacctagtaagagtcattgagctgccaactattattttgtagctcagaggtcttggagctctatccttggagttatacacttaaccagtgaagagcctaacggccaaagatgtaactgcttgacatatgaaaccacatggtgaacttagtttgttctaccaaggacctgaggtctttcttccatctgcattctgttactattgcatttttgctctggaaaatgttcccatttaacgaaattttacttctaaaatctgcatggcatctgaggagtttgagaaagtacttctaaaatgtgtcctgcagagccttctacagtgtatctttcggcttctccttagtatttatagaggcatatatatatatttttattatgctttaagttttagggtacatgtgcacaacgtgcaggtttgttacatatgtatacgtgtgccatgttggtgtgctgcacccattaactcgtcatttaacattaggtatatctcctcatgctatccctccccctcccccaaccccaaaacaggcctggtgtgtgatgttccccttcctgtgtctatgagttctcattgttcaattcccacctacgagtgagaacatgtggtgtttggttttttgtccttgagatagtttgctgagaatgatggtttctagcttcatccatgtccctacaaaggacacaaactcaaccttttttatggctgcgtagtattccatggtgtatatgtgcctcattttcttaatccagtctatcattgttggacatttgggttggttccaagtctttgctattgtgaatagtgccgcaataaacatacgtgtgcatatgtctttatagcagcatgttttataatcctttgggtatatacccagtaatgggatggctgggtcaaatggtatttctacttctagatccctgaggaatcgtatagaggcatattggagtccagtacatacacaggttcacagtgtgctagaagcattgctctttattagttattcttatcactggctgcagttttgtgatttctctctattaacattgcctttgaattgaaggtcactgttttatttgtattgctgctcttcagccaaaagaaaatagcttcattctgctttgttccaagaaactaatattctagcacgctttatgccttctgattggatttcatccaaattggaatagctcaggctagtggaaatattttatttaatcctctagggtttttttttttttttgactagctgttgtatcttgatacctttacatcactcaaagaatttaagctgttcctgctgccatgtcattagccagagaccaattttgtacaacccccttggctttgggcctaacactggtatgttccatttgtccattccagaaagggatgtacacatcactgtggtttgaattatattttaaaaaataatgatgatggtggttgctcagtggtgctcctctgatactctgaattctattatagatgaatgagctgcaaaatattctataaaaaaacaattatgtcttaaaagattataggctgcagcaattaccactaaaagggtgagagagcctgtagtttttgagcactgacaagcagatacatccagctaattttttgtgaaaacaccagcagagcaaattactcatgaaaaatctgttcacaggaatgaattaaatgccatgtccagtttaacagtgaacactgactgcaaccaaaaaccaatagagataaataatgaatggcatttgaattcattcatttgtatgattccaaaaatagcctcagtgccaatagtgtttctaatgtccaaaacccactgtagacatggagaaggataaagaagccaatgaaaaagaaactaaaaaagtgaccatttggattttattttttctccacattcctgcagccagtcacattgaccttttatttttattttttatttttaaactttagattcaggggatacatgttgtgcaggtttgtgacaaggatgtgttgtgtgatgctgaggtttgggcttctattgatcctgtcaccccaaatgtagttagtgaacatagcacccaataaaatgtttttcaatagtgcagtttctacagttactgttaatatggaattggcccaataacaactggctgaatgtataagttggatgatagcttgccagaaatttcccatggccttgttggtaggctggggtaagatatgataatatgctataaagaattattcttttaatttctctcctagttagactatacctaataaacttcagttttcagtgcacagaattggtcatttatcagctgtgcacctagattgctaagtgagttagtcctagcctaagtaattaacccattttggtgatgactgaatatatgtctaaattcaattaaaatgaagaatatggtgtaaaattatttttatgcaggagagcctgccattacattttaaataagagtttctctttcagagtttacatatttttaaatggctaaaaaaaaaaaatcacagttttttgtgtaggcatgatctatcacatttccctgtataaccccaaatgggaaaatggaagttctaggttccaagcttgggttcctgaatttcactttaatattttaaggattaagaaagaaccttgaaaggatattctgttgtagcccagtttttaggcagtattgattcaggaaaggcaagccccaaactggggcttagcccaggagggttcttggctttgcccaggaaagaattcaagggaaagatggtggtagaagaaaacagctttattgaagtggcagtgttatagttctgtgattgctcctgcagcttaaaggcagttctgcagtaatatttatacctacttttaattacatgcaaattaagaggtagttcatgcaaaaatttctaggaagagggtggtaacttctgcattgttggatcattgccatggaaaggggcagaaactctcaggtgttgccatggcaatggtaaacatggcatgctgggcctgtctttgaaaaggtgcttccattgcctccctgttttaaccagtcctcaattaggcctggtgtctgagccccacctcctacctctgtatcactcttaatactttgttatatttttattaatatatcaaggttatgttaattttgtgcactgaaagagctgtgaattttgcaaaagtttccaaattaactgagaagtgccaccaagagatatagtctattcagtttttccaaaagctgctttcttagcacatattccatttgggcataattttagcaagttgacttataaagcgtctttaagtggaatatttcttcccctgcctcacagccaaggcaatggctctccctggcactgtgcaaaccctgagccagacgctctgctctcaacagttacaacaaagtcaccaggtagatctagtttcactgtctctttcactgtcaaggagactgagtcttagagaggttctgacttgttcaacatcttgcaactagtaaagagtaaaattaaggtttgacttgagacagcttcttcagaactcatgctcttaaatcctgaccctatagtgtgaataccttggacccctgctcagccataaagtcctctcttgccctccactgtcatgaggactctccaaggttgtattgacttgaaggctacatgagaaaggtgggtgggtgcatactttacagttgagtttgatagcatagcaaggcttgacagataatgataactagctatctatgtgcctagggtttctcatacatcgcatcatgaatttttttacaaccttgtgtccagtgtattgatcagaaaggtcacagagacaagaagtgccccagcaggaattcagacccatctctgtttggcttcataatttatgcaaatcgatcccagacagaattctacttagaaatgcctcaagataccagttggaaattatctttcatttctgaaactggaaattaaaaaattatttaaacaatgcataatcattgtaaaaatatgtaggcattgggatatacagtataaataaaagaaaaatatcctttgtagagatcctttgtagacatagccaccattcatatttcgatgtgtgtcctttttgacctttttcattgtgtggctgagtggcattttgtcttttgctatttccgttgggttctctgtattatggctacttggatatgatctaaggaatgtttctctttctccagtaagtgctttcaatgcatatatcttaataaacaggtagaaagttggatagtttgctctttctactaataagtaggagccacgatagtagtattgtgacagtggtgatagtggttggagtgctagcggaggtgatagtagcagtggtcgtggtgctgatgatagtacgtgtgagagatgagttggtggtgtaggtagtgggaacagtggcagtggtggtagtggtgatggtagaagcagtggtagtggtgataggagtggtggtggtgatgataggagtggtggtggttgtagcagtgttgttggtaatggtggtagtgttaggagtggtggtagttgttgtggtaggagtggtagtggtggtaatggtagaagcagtgggtagagttggtgatggtggtagtggtaggagtggtggtgatagtggtggtaggagtgatggtggtgatggtaggagtggtggtgatgtttacttggcaaattcttgctcaggaagagtgtaggagtgttgttggtgatggtaggtaggagtggtggtgatggtagaggtggtggtaatggtaggagtgttggtggtgatggcaagagtggtggtgatggtaggagtggtggtgatggtgggaatggtggtgattgcagtaggagtggtggtagtggtagtgagtggtggtggtgatggtaggagtactggtgactgtagaagtggtggtggttgtaggaatggtggtgatggtggtgattgtagaagtggtggtgatggtaggagtggtagtggctgtggcagtgctggtgatggtgagagtgatggtggtagttgtagtggtgatgatggtaggagtggtagtggctgtggcagtgctggtgatggtgggagtgatggtggtagttgtggtgatgatggtaggagtggtggtggttgtggcagtgctggtgatggtgggagtgatggtggtagtggtagtggtgggagaagtcgtagtggtggtgatggtaggaatggtagtggtggtggtggtgattgtgggagtggtggtggtgccatgagtagtggtggtagtggtggtggtggtgattgtgggagtggtggtggtgccatgagtagtggtggtggtggtacgagttatggtgatgatggtagtgatggtaggggtggtggtgacagttgtgatggttggggggtggtgatggtagaagtggtggtgttggtggtaggagtattggtggtggtgatggctgaagtggtggtgggggtagtaggagtggtgatgatgatgatgacctgactggtggtggtggtggccgtattggtggtgttggtgatggtgggaatgtttgtgagcactttccattgcacttaaaaagaagtggacaaactcatttctcttgcctggacagttgtgagtgaagatgcctccatccctgagtctgaaccataagcttggaccacatatataagtgattcacttttccatagcatctgtgaagacatacttatagaaacaatgtatagttctgaaaatctgagggtttaatgaaaagtagcaaaaattcagttggtcatttacttccctggcacatttgatgattgacatttggtgaaagaacactttattgtgaatctgtttgaagtggtggggcaatgagtattttggaggtgcccataatcaagctctttcttcagaagcttgtgatcctgagaaattttgtgttttctgtgttgtctataaactgcaacttaaggatgtttgcaaggcctattggcatcacgtgctctctctctctctctctcacgcacacacacacacgcatgcgcacacacacacaagcttgctagagcttgccagtcatatgacacactcaagacctggtgtaagtactttttctattttagtcattcacaacttaactggtttacttggcaaattcttgctggggaagaacacttgcttcagaaccacatatcccactgaaatgtgtcagcaaagcaacaaatatgtatcaagaacaaggcaataggctaagtgctgagtgggcagatatcacagttaaattattgcttgtcttccaaaatttttgtatcatctccaaaggtttgtttttcctttcatatcacaacaaaatgatttcccagtcttctttccacacattgggcaagcttaaaatacaacatttctaaaaatcctctttggtgttccctgaaaagatctatgagctatggaaaccaagcttaccctaagctgtttagcattaagaatttgaggaaaccaaatctccacttttatgcagaaatcaaagagtagcataagtaacttgtaggttattttaataatacaataattttgtaaacaataaacagctcaaattttgtagctggctttgtaagtagagaaattgaaataaagtcactcaaaatcacactgactgattgattgtcaaaactcttagttcttcccaggactttttaaaaaacatacttttaataaaaagtacagataatatttacatattttgtatcctgatttatcttgtaatattaaaatatttcctgttttcctaattgttcattgacttactgcataccattctatgagtggatataccataatttacttaaccattcccctagaattggatctgaggctgtttccattttggagagttttttttgtttgtttctgttggctactgaatacttcctatgggaaagaggtggacgtggtggaaaatgaattgatagaatagtttgcatttgtataaagcatgcaaatttgtatttccagatatgtcacagtgaaaggatagaatctttcctgtagaaagaacacagaggttaagaatataggttttggagtcagacagaccttggctttatttctgaatccacataactgtgtgactaattttgaaaattttctcgaactttctataagcttctttctttcatttccaaagtgggagtaaccactctctcgtgggatcattgtgaggataaaatgattgatatgtagcaatgtgcttggcacatagcagtgctcataaaattgttgctattttctatgtttatcttattcctcatccaaactgtaacactcattcatttattttagtttgatttttttgagtcggggtctggctctgttgcccaggctggagtgcagtgatgtgatatcggctcactgcaacctctgcctcctgggctcaagccatcctcctacctcagcctcctgagtagctgagactacaggcgtgtgtcactgcacttggctacttatttgtattttttgtagaaatggggttttgctatgttgcccagtctgatcttgaatttctgagctcaagtgatgctcctgccttggcctctcaaagtgctaggattatagacatgagcctctgtgcccagccccattcatttatttattcagcattcaccagtggctgttgcatgcctgacactgagctttttactggcaagacagagctgaatgaggctgtgtttctgccttgtggatcccccagtatccagggacccagatcaaacagataggcaagacccctgtgtcacggaggaaactacaggggaaggtactgctttgggagtggctcttgggaaaagtaatagcaaaagcccagaggttagcaccgaaaaagatcaagttcagactctgcctttgctattttcttgctgtgaggccttgggtaaattacttaaagtttctgaatttcactttctgcatttgtattcttactctgcaaagtgttgtgaaagaatatacatatagctctgggcatgtagcagatgctcaaaaatgattattatgcttgaagtcttcagtgccccaatcatggctgattttcatgaaaataaactcaacaaactccagtgttctgaaatgtctgagactggctcagctgtgctcaggttagtctgaaatacattttattacagtctaattctctgcaaagtggtcatccacacatcttgtgtatggtaatgtggaattagaatattcagctctcagtgaatttcatttattggccattatgtaaaaaccaaagaaaaatgacttatgaagacattgattgctttgtagctttaaaagacctccttagaattagaatggctacacagcctctaagaatatggtctacactatatattttgtcatcctgcagacacaacaaggaagtgggaatcgaatctatttagcaggatgtctttatgtgtgaagatttcttgctgcttataaatgcttatttgattatttattcatagatatagaaagcacttttctttcattctgtttcctcattgtcacccaagtaagagtcacttattactgatgtgctaaagaataacagatgagcattgaccttcaattaaacattagcaaatatgttgcagtagcataaaaaataacatccacttgcttcagaatagaatgagatgatgcttaacatttctattgctgaggtcctacaagtaaaacatgtttgtttcataaatagaatttatattatcaattggaacatattcttcaatgcattattttgcctactgcttaggaatatcttcctttgttaattttgagttattttatttctactattcagccatgcttataaaatgcaagtcatatttctaatattattgctgttcttttagtcagatgggttcaaccacatttattcagcacctgctatgtgcagtacacttgtcagcatgctggtcttaaaccttgagctataaactgaaatcacattaacaatgtctagagaaagactgcagagatttaaaataaagaaaagtcagagaaaggtgagttatgttttttttgaccactgggccaaacagtgaaaggagaataggagaggaggttttcttaaaggcacaacaggattcacacaaatgaggagacttagaacagaaaggtcacaaatacagcacttgtagtgctggggatatgtattaatattttaaaaaaacaacatattttgaaataattctgcacttaaaagtcacaagtatgctacaaagagctcacatatctccctcgttctcatgcctgagctggctccttcctgagctggatacatacgcccgttatcagaacgtttttctgaccacttgagggcaagctgcagttttatttttatttttattttttgagtcagggcttgctctgttgccccggctagagtgcagtggcatgacatcggctctctgcaacctctgcctcctgggctcaagccatcctcccacctcagcctcctgagtagctgggactacaggcatgtgccactgcacctggctaattttttgtagagatggggttttgccatgttcccaggctggtcttgaactcttgagctcaagcaatcctcccaccttggcttctccaagtgctgggattacaggtgtgaatcatgatgccctgtcactcctaagtaccccattgtgtatgcccccaaacaaggacactctcccatgcacccaacctgcagcttcctccaagtcatgaagtcagcattaatacaacactcttctccagtctacagactccattccatttcaccaagcatcccagtgatgctcctttctcctttctgactcaggaacacacattgcatgcagttgttgtagctcttaagtttcctcctgcttgagcagttcgttagtactcaatcgttctctgtcttccatgtccttgaaagttttcaggagtgtagaccttacattttgttggatgaccttcagcctgggtctttcggatgtttcctcatgaccgggttcaggtcatgcaaccctaatgagaacctcttgaaaatgatactgtgcgttcacatcaggtgtcacacagtgtggacccctcccgccactgtggatggtaaccttcatcaccccatcattctgtggctgcctggtttctccagcactaagttcccatgtttcctttgatatctaaatagtatgttgtgggcatgatagtctatgattattctgatgcctactccccatcaaacctccatttcatcattcatttccattagtcagcattctattagcatggatgtgttggttcctattctattcaatgggctgtactttattactattattttgattctcaaagtgtctcaggtttggaccagaggaacttcttcaaggtgtctcttgtgttctattgacatgtccccatctgcctttgaatacttcttaatttttttgtacaacaggatgctgtagacacatctgtactgcccctgcctcagccctggcctcagccatttctcccaggagctctggttccttgtatggatggatggagtttagaaatcaggatctgtgtgcttggtgtgctcatggctactgaggtgtcattacttataggccttctcagtaggtaaatatagaaaatgtgtgtaaatgcactcatatgcttccttcgctatttccatattcacctgtgagtttgcatattaaaaactagtagtttatgctaatgtttcctattccagtgcaagtcattagaatcttttctacccttccccctttccatgattatatgaacattctccaataatcaggaatctggccctctttatcttcatatccttaactccttcatttgtttacatatttctccatgtaacctatctcccatttatcccagctgtcttccccatctgttgctgtgttcccctcaatgtgcctcatccccaggccctggcaggctcatcaccacgtgtgctgccagatgcctctgtgtggcagcccctgcatccttggtgctggtgagtggaccacctgtgtgctcctgtacaggctcccaacttaccaatggggccgctcactgccaccttttctgcacaggaagagacgagaaggcccatttatgattttgaccccagtcccaggcactgagttcttcaagggccaggaatgtgacttgttgatctttgtagcccaacagtctagcaatgttgatttacccaaagcattattaattgagtgacagatgaaataataaataaacatggcatttgaaaggtgaaaaagtcttgtcaatcattttcaaacactctcctctcccagaggaaccatttccacatcatctgtatcacatggacaaagattgccaatctgggtaaagcttcctccttcccccattgaggtgtgaaatggactgaatgcttgtgctccctaaattcctgtgttgaaaccctaattctaatgcgatggtattaggaggtggagtgtttgggaggtgattaggtcatgagggtggaggcttcatgaatggaattagtgcccttatacgaagaaaccagagaggtagcttgttccctttctgccatgagaaaaagcagctgcctgaaacgtggcagctctcaccagaacctatgctggcagcttgatcttcgacttccagcctccagaactctgggcaatacatttctgttgtttaatctacccagtctatggtactctgtaatagcatcaccaaccgacatagacaaggaggtctctgatgcacctttttgttgttttgtaacaatcatgatttaaaaacatcttgtggaggtattggtcatatttagcacatgaggctctgggacttaagtggggtaagtgatttgtcaaatagaatatgcacagttagtgtcaaagccgttgcccggatctgggtaccctgatccttagtgttgtgattctgtgttctatccaatgtcatgcctcccccacatgactcaggagcagagtgctggcatggagaagagacagggtggctgagcgagctcacttatggtcctgaataccaggggcagaggtttggactttgttctgcagcgcacatggagtcctccaggcctttgagaagattttgtattacaggttgagtacctcttctatgaaatgcttagaaccagaagtgttttaaatttccaatattttggggggttttagagtatttgcacatatataatgagatatcttcaggataggacccaagcctatacatgaaattcatttatgttttttgtacatcttatacacatagtctgaagttaacgctatgcaaaatttcaaaataattttgcacatgaaacaaaattttggctgcattttgactatgacccgtcacatgaggtcagatgtgcagttttctacttatggcatcatgtcagcactcaaaagctttcagactttggggcatttcaaatttcagatttttggattagagatgctcaacctgtaacatgtatgaaagtgcttggagtaatgccaggttctagcagatgtttttgcattttgtttatcagcttgtgcacatctgagtgttaggaaggtcgctctgttggtgatgtgtggaaaccatggaaggagtgagagagatcagacagagagtaattcatccttgcagaagtgctgacaactcgggctaggctggggacagtagaaatggagaagatgtgaatatgtcaaataccacgagagactcacgaggatgtgaaatgtaggaaggggacaaagcaaaggatctgaagctgaaggcctggatgggatagtgcccttgcaaggcagagtaacatcttgctaggtaggtaggcagtgaacttgatttaagacttgatgagatttatgtcttatattcatttagttgctaatgaaaaggatttaaagtggcttatgaaaaacataaaaaaacaagaaacaaaacaagggaatctaaagttcattgtaatcagactcattttttgaacaatttgctgtgagccaggcagcatcccaggtgcaggtcactatacaatgaccaacactgtgtcatggcgcctcttgtgtggatgcatgaggccttgaacatgtggaggtgagggtgtggtggcttgtcaaggagaacctgcctgtgcttagggagctggtggagcagggagcctacctgcagggttggcaggaccggaggagatactgggatctgatggatgaggtagacttagcctgggctggatgtggaggaagaatgactctggcaatgggaacagcagattctcctgaaccctgctcccagctcctctcacagcaactttgcttttctggttccctatgtccgatctgtcagagaacatctcaaatccgaccacttttcaccacctgcgctttcatttccaggtcctggctacccttaggtcttgcctggggaacatcaatgaccctgtgactggtctctgggctctgctcttttacaatgtgttcccaacagagcagccaggtgatcctgttaaacatgagctagatcatgccagtcctctgctcagaacccttcagtggctctcatctcccttggggtaaacaccaaagtctgctacaatggcctatgtggctctgaagatcaagcccactctcataccctctctccctcatctactactttccccttggttcaccctactaggagtgttccttacatattaaagtgtgtatttgcctcatggcttttgcactctctgggagctccctctgcctggaatatccaattagtgaataggggtgtcattcggggaacccagagagccagcttttgtcagaatggaggtaggatgcacccttatgctaaccagaggtggtgctggcagggcaagtggaagctcccagtagctgagagctgtgagagaggctggagtaggagataatttagaaattggagatcatcactgaagctatgcaattgctggtgaccatcctgatgcccttttctaatcataagataaaaaataactggggctgagcatggtggctcacgcctgcaatcctaacactttgggaggccgaggcaggaagatcacttgaggccaggagtttgtgatcagcctggacaacatgacaaaaccccatctctgaaaaaaaaaatttaaaaagcagagcctggtggcacatacctgtagtccaagttacttaggaggctgaggtgggagtattgcttgagcccaggagtttgacatcagcctgggcaacataacagggctccttagctacaaaaataaaaataaaaaaagctaggtgtggtggcacatgccagtagtcccagctacttgggaggctgaggcaggaggatcgcttgagcccaggagttggaggctgccactgcattccagcataggtgacagagcaacactttgtcttaaaaaagaaaaaaaaagagagaaagtagtagcttttgatgcctacccttttgaaggtgagtggcagcatggaacatagctaatcacagatattttctgcgataacttatatctttctttggaattcactgtgagtgtaatttttggcagccagtttaccatttccagtgtttaattttgttggatcagcctgcgctctctgagaacttttcatctggcagtggatgggtatagtttagaatatggtggatagcagagggaggctagactgggtttttaattttttttggaatttgaagacagtgcttaatgatattactaataatagacaatccttttgaacacatacaaaatgccaggcatgatgctaattgctttgcatagattatctcagttaatcctcagaaggccttatgatgtagatactattattaaccccattttttacagagcaggaaactgaagcttagaaaggttaagtaacttgaaggtcagacagctagaagtggcagaggtggggaagactcaggttttctcctaacccctatggaacagatctggatgcatctttacatacattatgactgtatcaggatgctattttagaacacataattcaagaactttattgcgtttcaccaaagttttgattttgtagaacaagaaataaagtattaagaaagaaatcatataaacatttgaacgcttggtgtcagttaaggaatgggtacatttcagcattatcctagaaggtcttatcaggccagactctactgcgtattttaagtggggtgtctgaattagcttctgcagtaacttctgaagaaggtggcacagactgagagatctgctaattacttgggacttgatcttggacagatgaccttttctagtatccttagaatgaattgttggtaaatgcttagtttccggctataggtttcaatgcatatgacaagtttatgtgaatgtctttcacttaacagcctcagagacacaagttttctgccctttcctctacctttttgggacccaggtgtgtgccttgggaatgggccagtgcaggaaaagagttaggttgagaggcacgctgtgactcatgttactctctgctggtgtatgataaaaggttttgttcaaaatgacaagcttgttgaaaaatgtgttttaatttagacttgagtcttatcgaaatggcctccttagaaaatggcttatagagccataagaacataaaggagtctttgtgatctagggtagagactcttaaaacattttctcattatgacgtaaaaaaggataatgtttgtattgcacactggggttaagtagtaagtgctcatggcccgaggtgatggcttgggatgttgagctgccttgggcccacccactgccccagggtgaagaggatcaaggtcttagtgcactagcctgccaaggaccaccagaagggaagctctgatgaatggtatcttaaaacccagtccttccatttctgcagaaatagttttatgtgaaactttctaattctttgggcattggattttgaagataagttctcattagaatggattccaatttctgcagtttatttaaaattttttaacagtttgataccaacactttattagcaaagaaaatggaatcaacttttttttttggtgccagaaagcatagttttttttccataagaaacaaaggtggaatatatgtaatgggtgagagacaaccaaaacttgccacataagggccagtgagagaatcccaacaaatagcaaaagttcatttttccatgacctattcatcacagaacaattaaaaagctacacaaagatcagtcttacctgcattttagaaatacatttcaattcacccatggatccaacatgggtgatctatctatctattcttttagatagacagagaagtttttattaactaacttaggaaaaaacactacctgttaaactcataaacaattgtttaaagagtatctacagaatccttctctcaatgtttccatgtaaaagaaatgaaaatcaatagtccagagatcctcgttaataatgagccactgataaacacaacatatttataacttgtataacattttatttatgtgcattctttgagcattatgcaatatgtaattaaaatttttttaaataaaaaaatttaatatctttattttttgtcaattgatttttccccacttaaaaaatttgcaaataataattgtgcatatttatggggtacatagcgatgcttcagtacatataatatatagtgatcagatcggggtaattagcatatccttcatctcaaacatttattttcttgtttttttttgagacgtagttttcctctgttgcccaggctggagtgcagtggcaagatctcggctcactgcatccttcatctcctgagttcaagtgattctcctgcctcagcctcccgagtagctgggatcacaggcgcctaccaccatgcctggctaatttttgtatttttagtagagacggggtttcactatgttggtcaagctggtcttgaactcctgacctcaagcaatccacctgcttcggcctcccaaagtgctgggattacaggtatgagccaccgcgctcagcctaaacattcattatctttttgtgttgggaacattcaacatccttctgactatttgaaactctaaaatatactattgtgaactatagtcattctctattgctgtagaacactagaacttattcctcctatctagctgtaattctgtaacttttaacaaatctctccctatccttcacttccccctacccttctcagcctctaatatcctctatcctacctcttacttctatgacatcaaccctgatacagtttggatgtttgtccccttcaaatttcatgttgaaatgtgatccccagtgttggagatgggcctggtgggaggtgtttgggtcatggggtggatccctcgagaatggcttgattctcttcccatggtaatgagtgagttttcactctgttagttcacatgagagctggttaaaagagcctggcatttcttgcttgttccctctcttgccacgtgatgtgcctgctctcccttagccttctgccatgattgtaagctccctgaggccctcactggaagcagatgccggcactaagcttcttgtaaagtctgcagaaccaggagctaaataaatctgttttctttataaattacccagcctcaggtattcctttatagcaatgcaaaacggatttaagcaaactcattttagcttccacatatgagtgaaaacatgtttaactttctgttcctggcttatttcacttaacataatgtctttcagttccattcatgttgccaagaatgacaggatttcattcttaatggctgaatagtatttcattgtggatatataccacatttgctttatccattcatctgttgttggacacttagattgattccatatcttgactaatatgaataatgctgcaagaacatgggggtgtagatgtctctttgagatgctgatttcctttcttttggataaatgtgcagtagtgggattgctggatcatatgattgttctatttgtagtttcttgaggaacttccatactgttctccattgtggctgtactggtttacattcccaccaacaatgtataagagttcctttttcttcacatccttacaagcatttgctgtttattttatttttttgtctttttgataatagctatcctaactggggtgagatgatacctcattgtgattttgatttgcatatacctgatgatcagtgatgttgagcattaaaaatacatttttggccatttttatgccttcttttgagaaatgtctgttcggattatttgcccatttttaaattagattgtatttcttttgttgagatgattcagttccttgtatattctggatagtaatcccctgttggatgggtagtttgcaaacattttctcccattctgtaggttgtcttttcactctgttgattgtttatatcttttatttttttgagaaagggtctcactctattccccagactagaatgcagtggcatgatcacagatcactgcagcctcgacttccccagactcaggtgatcctcccacctcagcctcctgagtagctgggactacagccatacaccaccatgcctggctaatttttgtatttttgtgtagagatggtgtttcaccatgtttcccaggctggtcttaaactcctgagctcaagtgatcctcctcgtttagcctcccaaagtgctgggattacaggtgtgagccattgggcctggccttgttgattgttttctttgctgtgcagaagatttttaatttgataaaatctcacttgtttagttttgctattgttgtctgtgcttttaaaatcttattcataaaatgttttcccaggctcatgtcctctgttttcttctcataattttatcatttttggtcttacatttaggtctttgattgacttagactagattttcatataaggtgagagacaggggtctactttcatccttctgcatatggatatacagttttcccaacaccatttattgaagagaccttcttttccccgattagtgtttggaacctttgtcaaaaatccaaaaatcagttgacagtatatatgtggattaatttctggattctcaatactgttccatcggtccgtgtatctaattttatgccagtaccatgttgttttggttactacagctttgtagtatattttgaggtctggtagtgtgatacctccagtgttgttcttttcgcttatgattactttggttatttggggtcttttgtagttccatacaaactttaggatttttttttctgtttctgtgagaaatgtcattggtattttgatagagattgcactgttattttaacaatattaattcttacaatccatcagtatgggctgtcttttcatttgtttgtatcctcttcaatttctttcatcaatggttcatagtttcccttgcagagatctttcactttcttggttaaatttatttctaggtattttaatatttttgtagttattgtaaatgaaatttccttattaatttatttttcagctagtttattgtccatgtatagaaatgccactggtttttgtatattaattttgtatcctgcaacttcactgaattcatttatcagttctaagagtttttttgctagagtctttaggtttttctagatataagagcatgccatctgcaaatagggacaatttaacttctgccattccaatttgaatgtcttttatttctctctcttatctaattgctctggataggacttccagtgctatgttgaataagactggtgacagttgggcatccttgtgctgttccatttattagaggaaaagctttcagcatttccccattcagtaagatgttcactgtgtgtttgtcagatatgccatttattacattgaggtactttccttctatacctaatttgttgagaatttttttattatgaagggatgttgaattttatcaaaagctttttctgcatctattgagatgatcatatgatttttgcccttcattctattgatgagatgtatgatgtttattgatttgcatattttgaaccaactttgcattcctgggataaatcccacttgatcatggtatattatctttttgatgtgttgtttgattctgtttgctgatattctgttgagaatttttgtgtctctcttcatcagagatgttggcttcttttgttgttgtgtccttgtctcattttggtgtcagagtaatgttaaccttgtagaatgagttaggaggaattccttgccttttaattttttggaatagtttaagaagaattggtattaattattctttaaaggttcaacagagggtgtgggataggggtagggagtgcataccttatgcttctaatctggagcaatgcagctgtgcagattcctggcagctctccaaactggactcagggcttgcaagaactgtgagattctccttttgcaaggactgtaggtgtttgctctgtcaataggagttgatgaggtccttctgtttatcttttccatgcaataagaagtccctcctgactctaggcagattcaatctgagcaggggatacagggctgcagaggctgagtgcctgcatgctgcctttcgggactgccattcatcacagttgcatcttcactcccccaccgtactccagcaccctcccttcaacactccagtcaaatcttactgtttattcattgccttggtccttttttttggtgggggtaggggggcaggcagaatgccaggcatctctaatcaaccatctgctgacagcactcttccaaatgatctggagtttatttttatttttaagaaaaaattgtattacacagattctatatttataccttgtgctagtagacttaaggtcattaaaatataatggaacccctactttacaacagaagtggatatatagtcatctatagcatggtagaattcgaacatcatttctatggctttagtaactgtgactggctctatctggatgtgcaatttctgaggaaatgttaaaatcaaaacttgggcactgattttttttaaaaaaggaattatataaaactcaccaaaattatagtttttttccccaaaatgctcattgtgcttttaaaataattaatattaagtatccctctgtgtgaagaccataattatgaccatcatatcactatgtcaacaatgacctttgagagttaaaagaataaaagataggagagccatcttgttggtgcaaagaagattcttagaagtaccaactgagagatgaaagtgctggcctagaaactagtaaccttgtcatgatgtcattaaggcaaaggttcactacaactggagctaagagacaccggggttatctattttgcatttcatggttcttttttcctctctctcatcattttgggtttccagctgagacgttacaacaaagattagaagacctggaacaagagaaaatcagcctgcactttcaacttccttcaaggcagccagctcttagcagtttcctgggtcacctggcagcacaagtccaggctgccttgcgccgtggggccactcagcagtgagtacttgttattgtcaccattttcccctcatgtttcttcctacctctcagctcccacatagtgaagagctgggaggagcttagctgtagagacccttggctgcctttcctgggaagggccctttgttggttgggaaggtggggattcttccagagtgagagatggcccatgtgggtcatgcatctctagaaagaagacttttctgccacttgacagagagagaaccttctcaagtgcagctgcatcccaggtctgaagcatctcttgggaaactacccttctaagaaggtgggggtaatttcctcttgttgaggcagcttggtgtcctgtgatcatattaagcctgtaagataaacagatggtcccctctgaccgagcgatgaaaatccatcctcctcctaactctgccctccagctcctgagcaacatttgctatttgtgtcacccaaggctcttctgagattagtaatatatagagagcagttgctgcttctaatccagtggcttgtggtcctggctgcatgtttgaataacttagaaagatttaaaacctaccaatgtccaggctcctccccaggcaagctaagtcagaatgtctaggtgtgggaggcaagggtggctcccagatattggcatgcttaaaaaggctgagaaccactgctccatctacctttgtgttccctttctccctaggtaaaggtctgagagggaacaggtgttttatgaatgctatgagcctcatcacaattcaggtctggttctacttagttatcaacatggccacaacaattccactttatttcccacttccaattggtcctgacaatcacaagattttctggcctattcctattaagtgtacatggcattatacatttagtttatcttgatacctccctgaagcctgcctgcacagtgagaccaattactttcagttttgccagtagcatgtagcagagtgaatggcacctggtaggtgcttccttataactatttgcttagtgaactttttcatggttctcctcaatagagagtgaatttcacctcgccattttcattcttttctaatctgacattgagacatcattgcaacattgcgtgttcctctttcacacatgaggccactcccaaattgactttctctgtaattctctcattcttttatctttggggttatttcttgtcgtctactccagtcttgggaaaattttagcatgtaaaaatagggcacaaagattgaggcacaataaatttagctaatttattatgtttctatttatttaacaaacactttcataacagttactaaatgctttagaagttactcatttaatttatttccatttttgaaaattgtggtaaaatacacataacataaaattcaccatcttaagtgatggtgattaagtgattaagccattgttaagtatacagttcagtggtattgaatacatcataatgttgtgcaatcatcaccaccattcatctccagaacttttccctcttccccaactgacactctgtacccattaagcaataaatccccatcccttcccctcttccagtccatgacaaccacattctaatttccatttctctgaatttgactactctgtgtacctcatagaagtgacatcatacaatatttgctcttttgtgactgacatttctcatagtatagtgtcttcaatgttcatccatctgatagcatgtgtcagaatttcctttctttcaaggctgtataatactccattgtatggatagactacagtttgctcattcattcattaaaataactcatttaatgttcatgacaattctagggggtagtattattttatatattgatatctacatgtatagagatctgtatctacatctatacctgaattttaggatgaggaaaccaggcccaatagaagctaagaaacttaggcagatccaccagcaggtgagtgctgagggagacacaaacccaactgtctggcttgcatcttggccctgaatcagtgcactgtgctgccttttaagtctgggctggcaaaggctgctatattattatctctttagccatacctgcaatttggatggagagtgtattagtccattctcacattgctataaagaaataactgagactgagtagtttataaatgaaagaagttaattgtctcatggttctacaggctgtacagggagcatgatggtagcatctgctcagcttctggggaggcctcagtaaacttacaatcatggtggaaggtgaaaggggagcacacacattgcattgccagagtaggaacaagagagagagagaaaagagggaggtgccacacacttttaaacaacgagatctcatgagaactctatcatgagaatagcaccagaggatggtgctaaaccattcatgaagtatccacccccatgatgcagtcatcttccaccaggccctgcctccaacacttgggattacaatttcacttgagatttgggtggggacacagatccaaaccatatcattccacccatgttctccccaaatctcatgtttttctcacattgcaaaatacaatcatcccttcccaatagtcccccaaagacttaactcatttccagcattaactcaaaagtccaaagtctcatctgagacaaggctagtcccttctgcctgtgagagtctgtaaaatataaaaccagtcagttacttccaagatatagacattgggttaatactcctgttccaaaagagagaaactggtcaaaagaaaggggctacaggccccatgcaaattgaaatgcagtagggcagtcattaaatcttaaagctccaaaataatctcattttgactccatgtctcacatccagagcacactggtgcaaggagtgggctcccataaccttgggcagccctgcccttgtggctttgcagggttcagatgctgcagctgctctcacaggctggcattgagtacctgcagcttttccatgctgaggatgcaagctgccagtggatctgctattccagggtctgcaggatggtggcccccttctcacagctccactaggcagtgccccagtggggactctgtgtggggttccaactccacattccccctccatattaccctagtagtggttctccatgaggggtcctgccctgcagcagacttctgcctagacaaccaaacttttccatacatcctctgaaacctaggcagaggctcccaagcctcaactcttgcactctgtgcacctgcaggcttaacaccatgtggaaattgccaaggcttatggcttgcaccctcagaagcagtggtccaagctgtatctggacccctttgagccatgtctggagttggaaaaactgacagcagtgtgaggagcagtgtcctgaggctgtgcagagcactggggccctggggctggcccatgaaaccattccgtcctcctcggcctccaagcctatgaggggaggggctgccatgaaggtctctgaaatgcctctgaggccttttccccattgtcttggctattagcactcagctcctttttacttatgcaaatttttgcagcctgcttgaattcctccctcgaaaatggtcttttcttttctaccacatggccaagctgcaaattttccaaacttttatgctttgtttcctctttaaatataagttcaaactttaggtcatttatttgctcatgcatatgagaataggttgttagaagcagccaggccacatcttgaatgctttgctgcttagaaatgtcttccaccagataccctaaatcattaatctcaagttcaaagatccacagattccctagggcaggggcacaatgcagccaagttctttgctaagcaataacaaaattgacctttactccagttcccaataagtttctcatttccatctgagacctcatgagcctggctttcactgttcatatcactaccagcattttggtcataaccattcaatcagtttctaggcatttccaaacttttcctcatcttcgtgtcttcttctgagccatccacactcttccaacctcagcccattacccgattccaaagccagttccacattttcaggtatctttactttatagcaatgccccacttcttggtaccaattttctgtattagtccattttcacattattataaagaaatacccaagactgggtaatttataaagaaaagaggcttaattggctcactattctgcaggatgtacaggaagcatgatctggcatctgctctggcttctggggaggccttaggaaacttacaatcatggcagaaggtgaagggggagctagcatatcacatggctggagcagcaagagagagagaaatgggaggtattactcacttttaaacatccagaccttgtgagaactctatcacgagaacaccaggggatggtgttaaacattcatgaaagatccatccccatgatttaatcacctcccaccaggacccacctccaacattggggattacaattcaacatgagatttgggtggggacgcagatccaaaccatagcagagagtgatgcttttattctggtcttgcctaagtttttgatagaatatgattaactaaaagccagtgtcatgcattcttaattatattaggttacaccataaggacatctcttacatttgactgtttgaaacctgtcaaacattttatggggtttgacctaataaggcccccagaaaagtataggcctttattaaacatttatcaagccaatattaactgttggcttactttatgagctatcatcctctttccttttccttacaggagttgtctgtatactatgccagtgaatgttccattcactttttgagctcactgtgacctgatttctgtctctatcactcctcaaatatctaccaaagtcagcaatgactttctatttgctaaattaaaagacatttttcaattcttattctgctatgtatcatggcagtgtctagaatttttaataaattcattcttaaaactcccatttcccttggctttcatgatttcacccttcctggtcttcttgctacatttctggccattcttcttaatgtcttatgagctccttctctccctttcttcttaattttttttttttgagacagagtctcactctattggccaggctggtctcaaactcctggggttaagcaattcttccaccttgggctcctgaagtgttgggattacaggcatgagccaccatgcccagcccctttctctttaatattgttgttcttctgtcttctgttctagcttttcctctcttctcactttgtatcttctttctcagtggtctcaaatgctctgagtcttcagatactgtttctatactattttttcccaaatttctatctctagccctgatttatctccagaattccaatccacaattcagttttctattgagcatctcccttatttttacttaatttagtatctttttatccttaacattactatctctttatccttgccttttactaagtttgctatcttttaaactaaatttaccgttgttctccccattcagttccttctcctatatccccagtctgaatgactttcactgccatttacccagttacccaagcaaggactctgaggcatctctggatcctccctttccatccctccccacagtcattggtcaccaagtcctgttgtgtccactgtctgtctctctcatttccactcacttgtctcacctgcacgtcagtgccttagttctggtctttaacactttaaatctggattattgcagtggtctccttgctggtatttctgattccattattaccacctctcattcatcttccacaaggccatgatagaagtattatgttatgctcaatggctccccattgcttgcaggataaaattcatgttgcttagcatgacattaaaagtcttcacgatccagcccctgcccagctgcccagcatttaactagacattaccagcatctgcaatagacacttactgaaatattatatgttacccccatgttctgaatgtttctagattctatgatcttgctcatgccccattgttgttaccaactatttcccattcttccagacttagtgaaacaaatatccttgcaaagctctgctcatcagtcacactgcctctcccttgaatgacagcataccttgaatgacttcacttctgcttaggtcttaaatacatctgttttcttgaatatctgtttactctgacagatgataagctccttgaggacaagactgtattatatttatctttctatttctagagactagaatagtgtctggcccataatctgtattctatattcattgaatgtgtgaatgtgacacatatgcatatgtagctatatataggttcacaaacgtatatgtgaatatcgagagagagagagagagagagagagagagagagagagagagagagagactgacttcactttattgggattcagttgccctagaggaaaatgctccttcagcttttcttctgaaattgccagcaagaaggagttgcacagaatcttgacagaaccttggataggaggtcatttctggtcctttctcttccaccaaccagctgtatatggcttggtgtagttattgaacctctccaaactccactcccttcatcagaaaatgagggggttaaattagatcactggtttctaaactaaagttatttatgtattattaccgtaactagaaaataatgagttgaaattaactttctgaaatttttctaatgcatattaacacaattacctagttgctaaaatttttttaaaacctgcctttcagtgtgccagctacccactgctgttttcacagtgaccaccagggggccatggtggcaggctgaagctcacacagcccagagcctggacagaaaccgctctcacaggctctccgagtcaaggggtatatataatatttttgaatgagtggtgcttttcctgtagaaataaaatagttgtatcaacatgaacaatgttaaatactaattaataactcaaataagtgcctgctaacctttttgggatcaagtatttatttattttgagaagctgatgaaagctatggacttcctctattgcaaaaccacgtgtacacatgtacatatatgaaaactattgagtgtattttcaggagactcacagatctcctgagttattcgttcactccttagagggtctttggttcccaggttaataaaatttagtttaggataagatttaagaagctgtaaacatccagatacaatcagatcctttatgttttattatttttgttgtcactttgttcttaaaaatcacaatttaattcagcttttgagaaacactgtttaatcctctgaactcgtgtagaagagcaccctgggttatgttcagatcctgccagcagccaagagagctttaactatcttcaggggttaactaggttcctctgagggcagatatcggtactcaaatcatttgacccctcttctgtggggtcctctggcccagtggatttgcttgttggaggaataacttttgtgatatcctcttgattcctgtgggaagttcatgtatctttgccacaacaaatggtatatgctcaggccaccctataatagaccctctctgccctgctaggtctctctaattcctttttccctggtttacggggcagcaacacatcagaagtgagttccttagacaatgctgcagcggacagtttgggtgccctgtgtcccaatccctcggcctccctccgattccctccacaactgggaaccgtgctcacagtcggctttccactcaggcacccaacaggtttatcaggcctgtctgcacaggtgttctcggaacctgtgtgaggaggggtgggggtggataatgccccagcctacccagcctcttagggaacagttctgaggcatgctccacactgtttttttttttcttttctaggaggttcctactactaggaaccttttggccaatgggttccatttgtccgtgtggtgaccagctccacagtgaaccttttattgaattttcctctttctcactctagtttcttgggaatcacttcttcaaaatcaacctgtactcaggtccctgtctcaggctctgctgttaagagaacctaaatatagacagatatccacattagagaattagatgtcagtcttccttcttgcagggcacccccaatctttgtgagtgaatctagtggattttttttttcccactgggtttgagtagaagagtttactcccatgtgggccaggtttggataggcaaaccatggggtaggggagaaaaacgcgtctctcatgaagacccatttcctagatggccaacaggtgggtgggtattgagagtggtggttgattgcagaggtgctggttgagcagccccaggggtaggatgccccactccatcattagagattcagaatgcagagcgtttaggtctaagtccttcagctttagtttccaactctggagcaacaggaaatttctacctcaatatcctgtgacaacagggattagaagagaagagagaggcttctgttcctactgtgtcttccatccaatcaaaggaaagttatttttcctttctcctaagagagagagttggcctactatcatcacacatttggaagataattttctcatgaatacattgcatttctctaactatacaccccgtgcatttttccactggatcttcaccaatatgtacgtgaaaactggtcctatttgtaaccgaaattgtgtgtgtgcatgtatgtgtttgtatgcatgcgcacacaaaatgtcctttatcgaagaccttttcccaggggataacctcaaactcaagcaaacaaaatataacaaagtttaaaacaaagatctatcatggttttccagtggggcttatcaaggcagagccccagtttgcctgtccacatatttcccactagcatgcttcctttgagatgggaacagagaagatgaatgttgtgcagcaccatgatgcttttgggcagagtcattcttcctctggccaattgctcctcaattgcctttgaaacatgtgattctttatttccctttggttgtcatgtagggactaacacagcattcagtgtcacagaattcagtgatggtcagctctaagcccttgagattggaatcaagatacactgtatgagaccagaaaataactgttacagacacattttacccaggatataaaatgagatggctatgatacaacatgaaaattatcattactggctggacatggtggctcacacctgtaatcccagctctttgggaggctgaggcaggaggattgcttgagaccaagagtttgagacaagcctgggcaacatagtgagacccccatctctacaaaaaaaaaaaaaaaaaaaaaaaaacaaaactagccaaatgcggtggtgcgtacctgtagtcctatctacttggaaagctaagtcaggaggattgcttgaactcaggaatttggggctgtagcaagctatgattacaccactgcactccagcctggctgacagagcaagatctcattgcaaagaaaaaaatatttgttattaccaacaaaccaggatatatttctgaaccccaaatcagatcaggagatggggaaccacaagagacagtggcatgccctgtgtcccactcccaggagaccaactccagacccttagtcatggcctcaataagagaagggagaaaggacaaggggggaaactaagttgtgagccacagaggacttctcagaacttgttttggaactattggattataaataaaagctcccaaataaaggtcttccatatcatcctctttgttcaaactcaactgaagtctgtcctgaggccagtggcatcaggcataactattatgaacccagataaatattcatgtgcctctcttgccgggtggtcatttctatgagtgggataagactgtataaaacaatgaaagtcagtttcctgaggaatgtgacttctccatgctccttactttttagacccaaatcatatatatatggaagaattataaagttacctgtattgtctctggcaattttacaacattcttttgtgctctcagaatggccttggtaatttagggcatcgtttattgaatgagcaagctatttctaggtgtaaagtgcacttcattggttctatgactggcccaaaccccttctttatcaccatcttcccaaagagggagagatgggacacacaagtcatatgacataaatttgataggatagtcatcagtagggagcagcaattagcaaccttaatcagaagagttatacccaactcttgttgccagaaatagtcatctgaaaggtggcactccctcaggaccgcatttttctaactgtgatgatgagaacatcggccttgttagttttggtcctttctgagactaaaattctgcgattccagcagtggcacaaagcaatttttctggtactctaacaacattaggggtctcagagaaggacctcctgtgttacatgtgaagatgcgtaaaccacagcactgtcactagcagttccggtgcaggattttctcacaggtggatttcctggcttctccttgccctgtcaacattctcacttgcagagccttctgaaggtggcctctcgagcaatgccaagggcactagagggcccagggggcctgagtgctgggctgggaaggaggtggcaatgtaggctcatcacaggcgtgcaccccttaacaagccggcacaggaaccacagacacctagacgatttcttcattcttttttcaatattcctgaaatatgcattcaaacagtcacatggtaaaaattgtcaatggaatgaaaacatttttcctgtgcaatttggagctaattttttctgtgatgtaggatcttattttatgaatggattttatcctcctttaaattattgatggaaaaggccaagatttttcccgtactggggtggtgccgatggagacctgtatgacactgtgggttccgggtgtgatcttggacacctgaatccccattggcactgagtgctgttctaacattctaccctgcatgtttttatttcttgcccctgagggatttgctcattttgcatactgattagtttatagcagcgatgctaatttgcagcgacatcagggattacactttgagaattattaaatataaaggggacaacattgcagaacacagaggaagcctgactcagaggacagaagatttgaaagacggaagcctgtcccttgcttcattactgagctacagtgtgtcctggggccatcactcagccatctgtggatccctttctctacctggagtaagaatatgagagacagacagaagagttttggttaatcacaggggattttcttatggattaagtaatgaatgtgattaatgataatatagagaattcccagttacccacctgtagctactctgtagctaattttcaattctgtgttgatttccttcaatgactctcatcccgacccagatggtatctatttaggaaattcaagaaacttgtactattagcataagcagagcaaattggggaataaattagtgcaaagaaatgatccaatgcaatagaaaagtgaatataaacggcttctggattttctaggacacagactcattgaatcattctataaatatttgccaagcccctactaagtgctgggcactggggccctcaccatgagatgagctcagtcccttccctccaggttcacagtcaggaacgagtaactgcaaacaggctgagactctgcagcccagaggaggaagtgcgtttcgttcccaccgacatcagtacctgatagtagtaggatggttttcttccagacatttcttctgatgcatataaatatcctcagacacattttatctttttttctttctcttttcttttttctttcttctttcctttcttttcttttttcttttctttctttctttccttctttctttttctttctttctttcccttccttccttcttttctttcttttcttttcttttcttttctcttcttttcttttcttttcttttcttttcttttcttttctttattttctttcctttcctttccttttcttttcttttcccttcccttgcctgcctgcctgcctttcctgccttcctgccttccttcctttcctttctttgtggtattgattgccctgttgcctaggctggggtgcagcagcatgatcatagctcactgcagcctctaactcctgggctcaagtgatcctgccacttcagcctcccaagtagctgggactacaagcacgtgccactgtgcctaatttttagttttgttttgttttttttttttttttggtagagataaggtctcactgtcttgcccaggctggactagaactcctgggctcaagtgatcctcctgcctcagcctcccaaagtgctgggatgacaggcttatgctaccatgcctggcccacatctttcatcagaaagtgagtgctttggacatgagtacagtgttcattttcccgatacaaacattgagatcctggggagatcaacagcaagcttcttgaggatggaggcgttctgtctccatccccaaacagccccagtgtgagggtggggtctgtatacaggagatgctcagtggtcatttatcaagtcaatttgttccccatagttcgctccatagggaaaacatttttgttatcatcatcactgtcattcttattttaaaaatgaagaaggtaaggttcagagagattaggtaagtgcggtgacacggtgtgaaaaaggcagaaccaagacccaaagcgtggcctctgcctccacaggctgtgcactctccacgttgcactgccctgctgatagccaccaagaggactcaaacaatgggtgtgtgtggatgtgactggaaggcaggggagatggaagttcctgggcttgctgagaacctaatggtgtgtggtatctgggaaagagcaggaacctgggactcagcctgatccgcattgactcctaaactctccttcctgctgtctgcatggccatgggctagaccctgacccaccgggactcggtttcctcatcagcaaaaccggtataatagcatcttcatcttaggtctgtaatgagaagcgaatgtgatcaaaagataacgtctggtgaacagtacgttcttgattcatagtactttattttattattatcagtttaaacatttttcttgatgctgctatttgcctttaagcatatgaaacaaagaatagatttctaaattatgtcatatgttacaataagtgacctttaagattattcagagaatccgatctttttggtagacttaggaacaaaagcaaggttcctttttctgtaactgctgttttctaacttacaaaaactgaggtgacatattttctagtattgtttctaaatgtatgaagcctgcttcattgcaccatggttggttggttcacttatttcgtaagtgtcaagttaagactcagcaagggggaagagtctcccccagctttaaagtctaccatcattggtccatgccttgcaattgcccatttcttcattgctttgtaatttttctgttgatgcatttgtctctcctgctccatggaagaaccaagaactgtttagcattgtgtccccagagccaagcacaatccatagtacataccaggcaagctcagtaatgttttttctttttctgaatgaatgaatgaaatggggtaggagtaaaaggagacaaacatagcacaacatatattaggatcagttactcattttcttttctaagaaatgcggaggcagtgcgaccctgtgttaatatataaataagaacatgcagcttcacgcttctcctcattgagccctgaaataagtacaaaggtggcagacaagatctagctgtgtgggagatgccacggaaggaggggatagctttaatttggcctttttaggatgctgagtttatgcctccaagtgtcagagccacagatgtctgctcctctgcaggggaagatgaccttgaaggtgatgttattgatgagctttatttaaaacacagacatgttcaagagctacaagactaattggctatgttaaaatatttaaatcaaaagtgcagctacttagtgtgtgttggcaaacattttatgttacagttgtaaaaatgatacatgctcactatggaaactttagaaagatcaatggaaagaaatgattccaccacccagagataagagctgatagcattttggtgaatatttttcttttattttatgtacatgttattaatatttttacaatggttcatttcatactttttgccataaaacctgctttagaaaaaacagcaataaatagtgaacattttccaggccagtgtatcttcttgtgtgacctaattttagtggctgcttagcattgctaagaggtcctgatgctggagcacgattagagtattttcagtcttgggctactaagaaaaaaacctgatttttgtagccgatctttgtgtaaaactatgattatttacatgcaatcaatacttggatgtgggaatgtagaatcccaagttatatttaattttaagtctcattcttattccctactctcaccaaagacttatggtttgggaaaacctttgccaggccagtttgttaggtgaaagatgatgttttatgttgtttggattttcatttaaaactatctttggaggctgggcttggtggctcatggctgtaatcccagtactttgggaggccgaggtgggcggatcatcaggtcaggagatcgagaccatcctggccaacaaggtgaaaccccgtctctactaaaagtacaaaaattagctggctgtggtggcgcgtgcctgtagtcccagctacattggaggctgaggcaggagaatcgcttgaacctgggaggcagaggttgcagtgagccaatatcatgccactgaactccagcctgggcaacagagctagaccttgtccaccctacaaaaaaaaaaaaaaaaaaaaaaaactttggataataatcattttccttaacacttcatttatttctgaggtgggggatcttgctatgttgcccaggttggtctcaaattcctaggctcaagcagttctctgccttggcctcccaggtagctggaactacaggtgtgcatcaccacgctcagctgtattccatctttttggaatttctggttggtgcacttgtcttttccttcataatttgatataactttttataaattagcaatattatccctttttctgccatatgtgtagcaatatatttttccccacttgtcgttcgcctattagttttagttgatggtgttttcttggacatagcttccttgaattgttgacgtagttttgcttagggtaaattgttttcctgcccacctgcattccattagaaatggattgttttaagggtgaatttgtcattctttggtgacaaataccaacaagtctcctttaaagacagctcaccaacataaggcccaaacctgtgccacattttcactagcatcactgtcaccaaatatgtcaactccggcaagaataagagaaggagcctaaaagattttaagtggttttgacagtctttagcaaattttttctgagaagctcgcatccaagcatctgcaaatcagtcacccctccttttaatctccatcaaggtcagctctggaatttggccctgtttggatagtccaaggcagtgctatccaataaaatctagtgtgagccatatacacaattttaaatgatctagtacgcacattaaaaaagattaagggccaggtgcgatgactcacacctgtaatcccagcactttgggaagcggaggagggaggatcacttgaggtcaggaattcgagaccagcctggccaacatggtgaaaccctgtctctgctaaaaatacaaaaattagctgggcatggtggcacacgcctgtagtcccagctattcgggaggctgaggcaggagaattgcttgaacccaggaagctgaggttacagtgagccgagattgcaccattgctttccagcctgggtgtcgcagtaagacattatctaaaaaaaaaaaaaaaaaaacaaaattaagaagaaagttaatcaagtgaaaattctgccaggagctcagttgcattttctagaactcttggcctaattttattaagttcaacactgtgataagtgctgggaataaaaaaaaatgtgatgtgggctctgcaagaagtgtatttctctgtgattaaagctgattgtgggagaaaatcttctgaaaccctcagtgacaaccttctcattgactagtgactcaaacagtagtgcaaagcagaagattctaaatgagcagaggaagggtggatgccgtaaaggcaagggaactggtgaatttcagaaatagtgagtgtgaattcaatactcctaatcatttgaataaagatcttgttatatttccccaaaattaataagaaacaggtgaaattaattttaacaatacatttaattcaatatatccaaaatattatctcaacatataatgaacttaaaaatattacgaatgagttattttgtactctttattttcatactaagtccttaaaatctggtgtgtgttttacacttttagcacattttaatttgggctaaccatgtgtcacatgtggtcaggggctaccttatcagacagtgcaggtcccataatagtattctgactaaggggaaaaagcaaaaatcacaagagattgtaattcaggtagaaacttacattaaggagctcatcctaaaaacaggtaagtaccctcctaagtatgagaacagatgggggccacttgctggagtttcttactcttaaaatacttgtcaacatgaggatttcagcttctgcatacctgtaccaataggtatgtgttgttttaagggccagcggagatgacacccacaccccactgagaatggagccgaggctgttggaacccactgctcaggacagcttgcacgtgtccatcacgagacgagactggcttcttcaggaaaagcagcagctacaggtgagcaggtgaaagatcttcaagaaatatgatggcatttttcttttctttgagacagggtcttgctctgttgcctaggttggagggcagtggtgcaatcatagctcattgcagccttgagctcctgggtgattctcccacctcagcctcccaagtagctggatctacaggtgtgaaccccatgcctggctaaatttttttatttttagtagatatcaggtcttagtatgttgctcaggctgctcttgaactcctgggctcaaagaatcctcctgcctcagtcttccaaagtgctgggattacaggcgtgagccactgtgccaagctggcatttttcttatccatttaagccaaatgcagccaagtgggtctttgctttccttgagtgtagcaattagagccttggctgtcaagccggggagtacaaaaaggagagatggtgggaatgactagaaggcttgtaggaatctcattacaaacgagggttgaaagctcagcagcatttgtgcctgttttcgatattcctcattaccttttgaatatgcttttcttgtctgccaggccaatttgccacttcttatcattttgacctttagaagcttcctttgaaaggcagaaagacatctgtgctgtgaaaatcctttatggaaattcctatcatggtagactgtgagctgcagttgttaagagacagagttgtaagtccggactgagcaaggcaggcacatctggaatgattagccggctgcttggaagcccaaggttggcccagaacagaggatgcaagttggctaagaatcatcgaggggctacaaatctgggtgcagcactgagttaaagccagagctctggaagttgacagggcaccccagaggcagggaatcttgaaacagggtccatgcctgcttgagcctggagctgtgaagcatgagtggggagcgatgaggacacattgattagaagcaacgtgacttcatgggaagagcataggtcttcaacacccaagttcaaatcctggcttaggctggaggcttcccatctctgatctggtcatagagtattcgtgttatctgaatttgccccatccaggtcactgcaagagtaaggtggcaaagggaggaaaaagtcagggcaatttatttgaaattatttcccccattaactgagcacttacacagtcaatgtgcatcattataacgtttggatagctgaaaatgtgaaatctggtttttgatttttaataacatttgccaattaaaggtctacacaattcctgagacagtcagagtgtacagaaaataattttagccctgggcacttagtgtttgaagcactctgggaaaggtacttgaatattcatttattcaacagacatttattaagggttcactaagtgccagatactgtttgaagtgcttgagattcctggggagcttttgatccactaggggtgagaatggggagatagacaataagtgataaacataataaaacctctattagacaactggtatgttatagggtgataagagcttcacagagtagactaagatgatgtggaagaggatggagtctactcattgagaagtgagattggacccaacagttcaaagaggagagggagtaggccttgcagaaatttctgcaagaggatcctgcagggggataccaacatgaaggcttagagtgggagtgggcctcctgtgttcagagggcagctggaggcccatgtggctggagcagtgtaaatgagggggaggatttggggaggaagtcagagataaaggggccttgtaaggatgtggacttttctcagattgcaacagggaaccattggatggtgttaagcagtgaagtgacatgatctgaccacattgtaaataatttgactcctgtattaggaataggatgtaagacaataggaaaacagtatgcagcttccttaaaagattaaaaattgattgactgtgtggtccagccacccccccttctgggtatatatctgtctcaaaaaaattgaatgcacagactcaaagagatgtttacacacccatgttcatagcagcgttatacacaatagccaaaaggtgataacaactcaagtgctcatcaacagataaatgataaacaaaatgagtatgtacatgtaatgagatattagtctcggaaggaaattctgacacacgctacagcatggttgaaccttgaggacattatgctaagtgaaatacactggttgcaaaaggataaatgctgtatgattccacttgtctgagttacctagaggagtcaaattcatagagaaagtagaatggtgattcccagggacttggaggaagagaggataatggggaattagttttcaatgggtacagagtctcagttttgcaagatgaaaagagttctgtggatggatggcagtgatggttgtacaacagtgtgaatgtacttaatgccactgaactctacacttaaaaatgctcaagatggtgaattttatgctatgtgtgttttaccagttaaaaaactaaaagaaaaagaaatgaatagggtagaggaagtcaaaagtggaggtagagaggttagttgagagactttgtcagtaatactgtaatcttggagcaattggggacactgaggcattacttttttcttagaatgtcttggtagtagacattctttagtaactcccaattcttctccccactcccagacttgaagtgggttcaggaggtagaagttgtaggtgatgcacctcggggctgagagaacgtgaataagaggttaggagacacccaggattagagttgcactcttatccccacaaaacatgggagtatgttaattaagagtcttattttttattcagaatcatatgggcagtgagacgatgatctactataacactgtgcacatgacgggcattcattacctgctgcttgtttagttaattgaccttaatattaaatgatattttatggattatttggatttcagtttgctatattcgtagaaattaacatttatttatattttcatgaactttagactgcatggcaccatctgcagcatctcattcttctctcagtcctgtagacttaagaagccattttttacctttctctgtactctgaattcttgtgtttggggacagactaacaaagggtcagttgcatttcttgttttggtctgtggctggggtaacctgcttagctcagacctcaggtgcatgaggctccctgccctgtgtcctaactcatccatccgaaatgaagtaagtcatttatgtatctgctgggttcttccaagtcaaattcttggctcaccccccatagttatttaatgcttgggagggaatgtttttccttatgccaactcattagaaatataaagctggcatgatttttccagttcagcaaacctccaaaaatctgcctgcctcagaaggggagttttgtagttctggtgcatatggccaattctcatttaaacgagtcattatcctcagagcagtttgccatgagcagggttaatttataaaatcttgtctcctcattctctacagaaagaaatcgaagctctccaagcaaggatgtttgtgctggaagccaaagatcaacagctgagaagggaaatagaggagcaagagcagcaactccagtggcagggctgcgacctgaccccactggtgggccagctgtccctgggtcagctgcaggaggtcagcaaggccttgcaggacaccctggcctcagccggtcagattcccttccatgcagagccaccggaaaccataaggaggtactgctgatttcctaactgattttgggtcgctcgcctctttgacctgttcattggaatgattttgtctgctgtctttcatttctaaacatttcccaagcagtctgtatttttcagtggaagcaccattggtgttttgggtgggaaaattcttcacggtgtggggcagtcctgaacattgcaagttatttcacatcctggccacttaacccactaaatgccagcgaccctccccattccaatatgcaccctccccatttccaaacaccctcaggacaccctctctccctttgagaactgttggaattcaattggttagagatcctaatgccaacttttgctgaggacgatcatctggatgaactatgcctctcactaagggaagaggcaagctattgagagagggacacccaatggcaaagttcccatctggaagaatggattgttactggtagctaaaatgtattgggtgcttaccatgtaccaggcagtgttataagctgactctatgagttacttcggttgttgtattcattttacaggtgaggaaaaacgtttaagaaggttataatttgcccaaagtcctaattaataagagagaaaactgatatttacactcctgttcattaattctgaagcccggtcttctccactctactctggagtgagaatcatccctgtattctgtatcatggaatgtctataagatacacatctactttttgccctttatttatttatttatttttaagagacagggtcttgctttgttgcccaggctggagcacagtggcacaatcatggctcactatagcttcaaattcctgggtttaagtgatcctttctgcctcagcatctggagtagctggaatcacaggcttgagcctccacatctggctatttttttttttttttaagttttttgcagaaatggtgtctctctatgttgcccatgctgttcttgaactcctgggctcaagcgatcctccctgcctcagcctctggaggagctgggaccacaggcttgggtcaccacatccggctatttttttgtttttatttttttgtagaggtgaagtatttctatgttgcccaggttgctcttgaattcctgggctcaagcgatcctcctgccttagcgtcctgaagtgctgggattacaggttttagccattgcacccaatctttcttgcccttcaagagctcatactctcatttctgagacatacagaacgcacacttacacatgttggacaaaaaagtgagtggcacccgaatgggtagatgagcagtaaggactgcaagtgctacgtgggtagagccgggagtgggagcaatggtcggcttggccactgtgctgaagaaaagacttcctacaactcaccacctgtagtggttgagaatacggactctgccacctgattgtctggagttgaaggttaactcctcactcaactcattattggccgatttgaggaaaggggtgttgataataatttctaccttatagagctatcacatggatgaaccgaggtagtacatagaaaactctcagcagagcctggatggtactaagcactttattgtgcttccagtcgtcgtctttacaatggaaatttcagtcttctgaaggccttcaaactacccgtccaaatatatcttactgtatttagtgaacgactgttctgtcttccacatgtatcacatcctatccagcctataaaagcaagcggcacatgctattctagggagttacttaagatctcctcccattccccttctatcccgaatatttccaggcagaactctccatggctcatgcccatggagagggggaagagatttggattgttgccggttttcatccaaatgaaacgggtcccttgaatacagcttgttctctcccacctgcactttcagaaccattcttcagctattgccttggtgtggtgggtaggctgttatgttctcattttgcaactgaggaatcaaaaactcagaaagtttccctgatgatgtagctagtaagagaccatcttgtgtacaactatggctgtctttgggcctgaatcaataaaagatggtttccttccagagagccaaggaagctatttctatgactaattctctttcctcatctaaaactaggagctccacagtgtggttggctgatagaactgagcccaggacttggtctggttttctacctgtatcctctggtttgccttttaatcaggatgagtcacagagaaggcatgaatgtgtgacttttactgagtaatctagtgctttgataggtttttatttgtttgtttgtttgtttgtatgttttgagatagagtctctctctgtcacccaggctggagtgcagtggtgcgatctcggctcactgcaacctccgcctcccaggttcaagcgattttcctgcctcagcctcctgagtagctgggactacaggcttgtgccagcacacccagctaattttttgtatttttagtagagacagggtttcaccatgttagccaggatggtcttaatttcctgacctcatgatctgccctccttggcctcccaaagtgctgagattacaggcgtgagccactgcgcccagccaattggataggttcttgaaaggcatttcaaaagttgtggctctctgattttatgatgctgttagggaaattatatatgaggatgatcttgaacatggggcactgctgtctgtggggtcctctgggagaatccaccatccccaatccgaacattcccactgagattacagaggtcaggtcaagaacaggctgccacgtttttgtgctgaggtgactataggaaaacctgggtatctcaaggactttcagaaaccatgaaggcttcatgtaggaggagatcttgggaatgtaaggatgaggctgggaacagtggctcacacctataatcccagcactttgggaggccaaggcgggaagaatgcttgagtccaggaatttgacacctaatctctacaaaaataaaaaaataaaaataaaaaaaattagccaggcatgattgagtgtacttgtagtcctagctactcgggaggctgaggcaggaaggttgctcaagccctggagttcgagattacagtgaactatgattgtgccactgcagtccagccagggcaacagagcaagaccctgactcaaagaaaaaaaaaaggaatgtaaggacgaagagtttcatgggagggtaggaataaaccagagcagttaaaaggtacaaaaaacctggacaatctaatgactagttaataacatgacctttttctcctgcgataaggaagttatacaggtgcctgcagcatggaacactcatggtgagcagaggccatcagcactggctggagttttgtgtggctggagtgtggccaccctgagacatcctcattatctgggtgattctcaagaggtgatccttggcatcagtctaatttactttgaggtgcagggaggtatcgccgcatctggagggcagtgtgggctgtgtaggtgcacactttgattggtcagcttcctttcttccaccgtagggaggtgaggcatcagactgctccctgccgtaaccatcaactagagaaacccgtcatcaatatttgggctttccatttgagaaggaagatatgtcttttccaagctgatgggctgcagcatggatctgcagaagtgaagcatttgaaagaaaccagtgtagaaccagctggctcaacaggtcagagagattgcttggtctagtatttttaactaattggacatgatcctgttaacctaatttttgctatgaagtattggttgtcttttagaaaatgctgacttagggataatatccagtaggtatatttagccaaatgaacccatcttacatacatcaatagctgccttcattgttcatgagaataggctcttcttaggccagatggagagagccagacaaattgtgaaacaggaaaaccttgaagtcttataaagagaagttgcagagactagtattgttacaaaacctagagaaacagatcactcaacatcacgactgttatcatcatctataaggattttcatagaggccagatacaaactcagggtgctgtctgtttgtaatttactcaactttctaacatgcaattgcaatatgctttgtttcgtggacaacgacccaacaacttgaaaagaaacttcctaatagcatgtgacatttctggatgtatcactggtggagacttacgtgcttacatggaggccatcgtttctgactgtggcttgttgggaaccccctggccaatgtcagagatgggctggaagtagagggcatgtgctggggtcaaggacacccagtgattttcggtttgggtgtgataacagaaatcaaagaagccatttgaattttccaatgtctgtgttctggatcaaataacttagcaggaggagatgaagtgttaccatcccagagacatcatagacactttttgagtagagccaacaaaaatggttttcttccagtgaacaaaaggagaaccctttttaagcactggagaatgaggagctccacagtatggaagctgacagagcaggggtgcatgaaaggacaggaaccacttaaaagatatgttcatttgaatttctctcatccctgggatttcaacccccctgctttaaaacaagtgccttgttttctcctgcaagtcttcctttgatgtgagggtcttagaagaaccacttttacccagtgagcttggttcttctcccacacgaaacccatggttcttgttctaccccctgctgactgcattcccattctctgtaatgggattgtgatgtgggggtgggggagggaggagagggaaaagatgggggacacagggaggaggtgacagtgtccaagattttctgtggatcacatccctccatgtgggcatgaggttccatctatttatttggcgtaaattgaggagaatggtgatttgcagctcctctctgtctagcaccattagctcagcctcccctggcttcttgttggttttatgtgtctggaaaaccaggggagggcagcctgtgacctcatgtagcatgcatatggctaacggcaaagtgagggaggaataattatagtaataatcacagtgatgacgtggagggctgcctaggatgctttctaacattctttagaaatgcttgactggcttgtattcatctggggttgagttcttcattcctcagctcctcggatttttcatgcttcatgtgaaatgtgttctggcagctcatggatgaattgtcgcttgttgtgcatttggaagaaacatgtcacatcttttgcaaaccattggcacaaagtgtgaaacaaactcaacccctggttacaggagggctggctgggccttggttggagagtctgggagcctcgcggcagggctgggctggggaggctcgcgggtggagaggagccaggccttctgcagtatccatgcccccagccactagctaaactgcccagggctccctggcggggggcactgattatgcagggtgctgcaggcatcctcatcacacctgtgctcagtccacaacatgcagtccctgctgatgtcagtcctccttgcaagtgagatttgaaataatgtaattcaccagctcacaactgaatgggaaaaaaaaatcaatagttcctcttttccctcagaaacatatcttattagagtgaggagacagtgaaacagcaaggcctgaattggaaaactgatcctgaatctaggatcctggtagagattctcaaagagggttgcgtggaagcagctgtgtgggaggggtcccattaatgctcttgccccgggggtagtgcgaggcagccaccaaactggagtcacgcacagactgcagagaatatccctgcagcatatcagcagtctccaagctgcttttccattcgtgaagattgttgttctttaatctccacttctgggctttgtctttctctctcctctgtctttgccttctacctgactggtttgccaagacaatggctttatgggactgagagcattagacatcatctggagaaagaggagagctttgcatttttctaggaaattctgattttccccctcttttttttggtaaggacttttctctcttttttagagatggggtttccctctgtcccacaggctggagtacagtggtatgatcatggctcattgcagcattttactcctgagctcaagtgatcctcctgcctcagccttccaagtgctaggattataggtgcatgtcaccatgccaggctaattttttaattttttatagagatgggggtcttgctatgttgccaggttagacttgaactcctgtcctcaagtgatctttccacctcagcctcctgggtcactgggattacagggttttcttttccccctactcccctttttaagtaaagtagacatcttgcttttctcaggaattcatgaggcagaaaaatatttgccaagacagcaaatgcagtgagacagaagtgtgtgagcaatgctggccagatgggtgcccggagtgaggcttccctgcataggcgacatctgcagcattcaggacctccctgcaggtgtgccctctccactcaaatttatcctgtctgtccttcttagttagactggtgttgatactcatacactaattttaatatctctgttatttacaaactgtcatacttgcttacaataaccctataaggtttgttgggcaatatattgtttttatgcccattttgcagatgaggctgctgagggtccaagttcacacagccgtaaaagcagtgccctcacgtctttggcgaatttttaatgcagagggaatccagagatggttcacactgatggcctgggagagaccaggccttggacagagtgcttagtccagcaatggaaagaagtccagcccagcagagccgtgggtctgtgggcccaaggaaaagagaatggatgtccctccaggccagggatggttgtctctgtgtgcctagtgttgcctgattggattggagccaaggtgtatctaaaaatagacagcctgggaagaccaaacaggcaactgtctcaagtcagagaggtctgtcagacgttccaaagaaagaaatgtgagaggaagagaaactggaaagcaaggccccgccccagggctagaggaactggtattacttgtctgtgaaaagagggtttgaactgggtggcgtggaaggtcttttctggttctacaatactttgcactttagtattttatgaaataagttaaaataagctgcctaaaaacccctcataattctattcctaggagctctatgttaagttcctccttaaagttccctgggcaggctgtgaccatccacaggccacggtgctccagctggcactttccttagggctggtccctagagcatggacctgagcaaagcctgctttccaagcactgctgctgcagctcagagcttagacctcgcctcaccattgtatatcctcccgttttcttctggaaagtcgtcattacaggcaacgtggaaaagtttaccagactataatctggtaaaggaggaagaggattggaaaagaaggaagagatttgaaaatcccccttatctggctgggtacagatgctgctcaccaggaaatgtaggttcccaataaaacaggacccccatttccagttttcattgcgttgtaaattaaaaataaaatcttaagcccccaaccactgaacggattccctcttggccaaggagaccccagagactccatacaaactgagttcccagccccagtgggccgggaggtcggatttgccttgttataatccctcccttttgtagcttagacataacaacagagcagcatcaatgctaaaacgagatcataagaactgatggaacagactctcggtggcaataagataccaaattataaacaagacctaaggccatgccaggcagggataagtctcacacccctgcacctaaagagtaaactaccttctgactgccacctgggttttctttttctctagcggctaaacgagcactgtcctagagatgagctatcttaaaaccatggcagtccttgcaccgccagatgctgactgactgactctctgttccaccagctgtaactgcagctttcattagaaaagagactgatttcagtaactttcttctgatacaaagaccaactgtggactgcttctggcctatttagagacacttgagtgcctttgtgttctgaaaagaccttttacatagagggcctaattgtaatacatgtaaatgttaagtctccaccctaaggtgaacataagttgtatataacatgtatgcttattcagtatgcatgcattaggaccaccttcatgaatattcatagctcctgctataacctgtggaatatgtatacttggtcaacctattcttgtttttttttttttttttttttttttttttaagatggagtctcgctctgtcgcccaggctgcagtgcggtggtgcatctcagctcactgcaagctccacttcccgggttcacgccattctcctgcctcagccgccggagtagctgggactacaggcaccggccaccacgcccggctaattttttgtatttttagtagagatggggtttcaccgtgttagccaggatggtctcaatctcctgacctcgtgatccacctgcctcggtctcccaaagtgctgggattacaagcgtgagccaccctgccggccttggtcaacctattctgtgtaaattcctgtcttacctgtccctcccttaaagtgcctgctaatggcttctgccggaggctatgcttcccagcctgttagaatggcaaccttgcaggctgtaacccccttttaagaaataaagctctccatattctcactcataggtgggaagtgaacaatgaggtcacatggacacaggaaggggaatatcacactctggggactgttgtgggctggggggaggggcgagggatagcattgggagatatacctaatgctagatgacgagttagtgggtgcagtgcaccagcatggcacatgtataaatatgtaactaacctgcacaatgtgcacatgtaccctaaaacttaaagtataataaaaaaaaaaaaaagaaaaggaaagaatgaaaaaaaaaagaaataaagctctcctttctaaattgataaattgtgtgatttttaagttaacaggctatatttgagaaactcaagggaggaattctgttttacttgcagatgtaaaaaaagactttattaacacatgaaaaaatgctcaccatcactggccatcagagaaatgcaaatcaaaaccacaatgagataccatctcacaccagttagaatggcaatcattaaaaagtcaggaaacaacaggtgctggagaggatgtggagaaataggaacacttttacactgttggtgggactgtaaactagttcaaccattgtggaagtcagtgtggcgattcctcagggatctagaactggaaataccatttgacccagccatcccattactgggtatatacccaaaggactataaatcatgctgctataaagacacatgcacacgtatgtttattgcggcattattcacaatagcaaagacttggaaccaacccagatgtccatcaatgatagactggattaagaaaatgtggcacatatacaccatggaatactatgcagccataaaaaatgatgagttcatgtcctttgtagggacatggatgaaattggaaatcatcattctcagtaaactatcacaagaacaaaaaaccaaacaccgcatattctcactcataggtgggaattgaacaatgagatcacatggacacaggaaggggaatatcacactctggggactgttgtggggtggggggaggggggagggatagcatctggagatatacctaatgctagatgacggttagtgggttcagcgcaccagcatggcacatgtatatatatgtaactaacctgcacaatgtgcacatgtaccctaaaacttaaagtataattaaaaaaaaaaaaaaaagaaatgcagcctcaggaaaaaaaaaaaagactttattttgtgctacagtaacatttacgatgatttttgaataacagaacaaaggagggtgaaaaaatggatatgtattttataatgtattttaatattttacaaattctctgggcttgttttctttaagaagcttacaacatgagtctattattcttagtattattattgtttaggtagctctttggaggcttgtgatttgtagactcatccatttctcttttatataatttaggcattagattaattattttcaactggagccccatggattatcaaagatgagagatagtcattttagaatgatcatagctagttctaatattgcagctgcaagtcaactctcacaaacatgaaagcatgtgacctattttaagtctttctcctagtcgatttcaacttttagtttccattattatcaccttgagaaccgttctgtacttaatttctctgtaatttacatgtcttttgcaatcttctgttccctttatcaaattctcttattctttcctttttgtaagttgtatgttactattccctgctttaacttttcagatgttaatttagtatgtcaggctaaactcttcttcagaccttgagctgaaactctgggagaagagcagaagttttggaatcttccagcagaaggtaatttagctctgctcagatagacccttctccagtgactgctgggaatatccccaggttggaaataccagctcattgcttgctgagaatttaatcagttaagagcacacctttttcgagctgtggaagggtgattaatctaccctgtgctgatagctaggctgctaagatgacccaaagcaaagccagacagaacctctagatttcctgtagctgctttcagtggggggtgctgtgtcttatatagagatcgttgttaaacattcatcttgactttcattgtcattactattttgtacttcctctttggcaaatttcctcagcttcctctttgagtcatgttgatattggtgtttggattctttatgcaatttctcctttagtcaactggatttttttcctactgttaattcattttgttcaccagtggtctatttttgcctttcttatccaataaagtatgtccatctttagtttacccacagaaacattttaggaaatgaaatcgacaatattccccagttttaggaatcaggctgatctgttgctttgtcaacagattttgagagatgcttgagagaaatgtgaggttaaaattgtctctgcagacttgagctgtgcatatgcttattcttagccagacgccagttaattaaagatgattcagaaaagaagaataaacccacagcagaaagtacaacgtttttggcaaactttacagttatggaaaatataaatacttagaaatttaggagaagcaagaatatattttaaaaattagtattaaatataaatgcaaatggctgggcacagtggctcatgtctgtaatcccaggactttgggaggccgaggtgggaggatcacttgaggtcaggcgtttcagagcaacctggccaacatggcaaaaccccgtctctaccaaaaaaaaatacaaaaattagccggctgtggtggcacgtctgtgtagttccagctactcgggaggctgaggtgggagagtcacttgaacatgggaggtggaggttgcagtgagtggagatcgtgtcactctactccagcctgggtgacagagcaagactgtctcaaaaaatataaataaataaataaatgcaagcagttctgggtatttatttaaaaactcagttgttcccatgggagcaactggacattacttattaaataatcagaataaagggagggtagtaattgaaatggaaatatgaagttgcctttggatcacgtaacagaataagcctggatgtagtatcattttccccttagatcaaattgttgtatttaatgggttgaactcacttgagtttttgggggtgggggaaagctctagagcccaagtactgaaatcttgtttggacatttaaatacatcgtggttatgagaatagttgaaaatatggagctgacttgattaccagtctccaaaaataagaggctggtaatttatttccttattattgtaaaaaagaatcattaaagaacttgtgaggaaggggtagaaaggagaatgattatgatctgaacataaggctgttcatatttctgattcctgttctcattttttcattattaaaccaccaaaatctcctacagacaaatgtctgtaagtcaaaatgtttttggcacatgaattacagtttcagtttggaataagattgtttgaggcaatgagaaagatctggttgaattaatacttggagtatttggataagccaaataccaagttcatcagttaaaaataaagctgtgatttttgatgaaactggacttcaatgcatgctgtgatgttgtgatgtcaggcagagcttcccagtaagcctggggacctgcaagagatggcacggggtgagggtgtgaacgcgtgtgtgtgctaccttactcatatgtgccaatttggaaagttcagcaaattcactattagggcttactcctttcctctgctcactgccttcgcatcagcacctcgatcacaggaaatcttttccaagaaaagatcagaaatccttacgttcatttttttctctccctttctccctccattatcccttatgatatgagttacatgggtgcatcttattaaaaagggttcatggtcttataaaatgtgacatcggccgggcacagtggctcacgcctgtaatcccaacactttgggaggccaaggtgggcagatcacgaggtcaggagtttgagaccagcctgtcccaacatggtgaaaccctgtctctactaaaaatgcaaaaattatccgggcatggtggtgcgcacctgtaatcccagctactcaggaggctgaggcagtacaatcgcttgaacccgggaggcagaggttgcagtaaaccgagatcgcaccattgcactccagcctgggtgacagagcgagactccgtctcaaaaaaaaaaaaaaaaagtgacacctcattttcagtttgctgagttatttggagaagttgtactttactaaaaggactcagaatatcagagtgtagcatcctagtggaagacacagtatccttgaaattcagagaaatagggagaatgtgagtcatgatgtgatgtatattcagagaaagagtcaaataactaaacgttcaagtatttccctggcctagttttctttggttcttttacttaatgtccttagccttggccagagagaaaaactctaaatatatttattccacccttgttaaaaatttatgtgcctgattttggtcagattactctaaaatattttcttactataatccaggtatggtatatgtctgcatgatttatgaaatggtctttctatactttattcctcccatgatcctcaaaagatgagctagttggtgagcacgaaggtgagtgtctggcttgagtccagcaaactctctggcttcagccaccaccgaactggaaagagataatgtgctttgccaaaggtggcaaggatggcaagcagaggccctggtgctcctacctctcagctcagatctctctccactgcaccacactggctttcccagaagtaaaggtctcagataaccagcttgagtcatttttatagccatgtagaatggcttgcttctgatgaatttatgtaccctgttgtgcctttacaagatcatctgaagtctagaggaattcatggcgtttgtgcctctgtgctccatgaatgtccgatgggtgccatgtgacattatcagctgtgaggatagaagggtctaaggaaagaaaaaggccaagtagataaacatgaatttcctaaagctgtttccacagtcattttgttatccacttgccctctgacagaaggtgaggggactgagcagtcattggcaaggttgttaatgtcaacagatttgtctgtgtgtgtgtgtgtgtgtgtgtgtgtgtgtgttattttatttatttatttatttatttatttatttatttatttagagacaaagtcttgctttgtcacccaggctggagtgcagtggtgcgatcatagctcactgtagcctcagcctcctgcactcaaggaatactcccacctcagcctctcgagtagctgggaccacagacacatgccaccatacttggctaatttttgtattattattattattattttggtagagacgggttttcaccatattgtccaggctggtcttgaactcccgcgctcaagtgatctgcccatcttggcctcccaaagtgcatgggttacagacgtgatccaccatacctggctgtgtgagtgtgttttcattaaaggcccaagtggcgcctgtgctaagatagctgtcattttgctctttccatcatttgtagtttgctttagtaataatctctcattcttaaactgagttttacaaaacaagaaacaggggatgggatagggaatgtagggagagggtagagagaaggctgtgcagagataaaattgaatttctcatctcctgtagctttttgctaaagtggaacttcagcataaagcctcatatacacaggcaggaagatgagcggacaactgtctgcagggagcaggccgtttgcacagttagcttcctagctgaaaaacacatccctcacttagtgtaaaaaatgacatgtatctcctgtatatttgtctctattttatatttctaatatctaatatatctctattatctattatatttctgtctcatctaatatattctgtatatttctgtctctattactctattatagagtgaaaaacaacatgtgtctcctgtatatttctgtctctattatcaatgttatctggcactttataaaacctttgtgttttttagattctctaaatatctaaaaataaaaaaggctagtaaaagatttttgaatgatagagcagttaaagaatatgggatagtagacctggaaggattttagaaataatttagtccaacttcctcattttgcaactgagaagatggagccccagatgaaagtgacttgttcaaagtcttgcagaaagttagtggggtagtggtgtaattctctaagtgtcgttaatattctttttctgcagaggtccagataagaacaggaacagagtttgttcttcaaaggctcatctttggggcaggtgtgttgttgtcaccttggatgtgcctctaatgctgagagccaaggctttgcctccagtgccaggtgctaaggtggttatggctgggttactggtggtacgaggaactggtaataaactaccaaagattgtatggaatgagaggtggtttctttaggatataatattaaaggggtctatccaggcctgcctgacattgtgtcccagagtaaggggtcaaatggaacttcccaccttgtcttcctacccttgcacctgtcccacaccatggtaggttttatatggggacctagcctgtatgcccaggtaatatctacacccttcaaggtagcctgtgctcgactactgcttgggcctagaggtatgcccactgcactgcgtccacccttgggagcagtgctctgagaagaggccctggcaggatgcagcctcctggctcttcaggaaggcacttctcgttttggctgcctgaaccagctttgggtggcatgtacctttggcgccccatttacccttcccctcaaggataaggaggatcaggacagagccctctaatgtggcagagagcaaggaaggcgttcttttgcctggatctaaagcaagtattggaagtattactaagagagggtgtggatttaagtatgttctaaggctcttgagataggcctccctaagggacaggatctggagaaaccaagtaaatagttgttagttgctgttagattggggcatgggattctctaaccaaatagatgcccaatgcagctgtcttagtccattttgttactacagactgagtaatttataaagagaggagatttatttcttacacttctggaggcttggaagtccaaggttgaggggcttgcatctggcaaggaccttcttactgcatcatcccatggcaggaagcagaagggcaagagagagagagagggaaagagagagtgagagtgagagcatgtgtgctagagagagcgctggagagagagagacagagagagaaagagagagacagagaaggggaggggaccaacctcacccttttgtcaggaacccactcccccagtaatgatatcaattcattcatgagggcagattcctggtaacctaatcatttcttaaaggtcccgcctctcgacacggttgccttgggaattaagtttccgacacgtgaattctggaggacacattgacattatagcaatagctataggtttttgagaaagatgagcaagatgctctaagcacaatcactctgaatttttggagccatcttctgatcttggcagcatgttggcagtgagaactcatctggcacttgctagaggcaggctcccagatgagaccactggtgccctttgcccaggcctacacctcacttccagacttctagctcttgccattctaagaggcaggaatgagtgaccctccacattgtcttccttcccatgccagcctgtattagtttgctgccataataaagtagcaccacagccacctggcttaaatacagaaattcatcatgtccagaagtccaagaatcagccgggcgcagtggctcatgcctgtaatcccagcactctggaaggctgaggtgggtggatcacttgaggtcaggagtttgagaccagtctggataatatggtgaaaccccatttctactaaaaataccaaaaaaattagctgggtgtgctggcgcaggcctgtaattgagctacttgggaggctgaggcaggagaatcgcttgaacccagaaggtggaggttgcagtgagctgagatcacaccactgcactccagcctgggtgacagagtgagactccatctcagaaaaaacaaaaaaagtccaagaatcaaggtgtcagcagggttgcttccttctggggactgttagggaaggatctgtatctctccttggcttgtagatgatcattttctccctgtgtctttttatatcatcttccctctatgcatgtccccgaatccacatttccccttttataaggacaccagtcatgtcggagtatggttgatcttaactcaaagtacatttgcaacaaccctatttccaactgcagtcacattctgaggtatggaggtcaggacatcaacatacgaattttgtggagaacacaattcaacacgtaatatagcccatgaaaggaaaccctctaacagagataaaccagagagtaagacttctgagagatgcaatttaaaaagaagagaggacatctcatgagttgactccaagtttttaacctctttctctgtcatgcaaagcttcaccccagccatacagtcaagagcagctgcagcctttaatccctgatcctgagggggcagtggtgggaaatggggataaagatggagccgctccccatcctgtggtttgagtgtgcctctagcagaggtgaggatgcttccaccccaccccaccccaccccacttatttcttagaagacaagaatgtgagtattgttcattaatcaaatactgattaggtacacactgtgtaccaaacacttcaagtacttctccaaaaatccttgcccacatgaaattctttttctagtagtaaaaggcagaaataaataacaaacataataaattagtaagttacatgtaggttagtagaaaatgaacatgacctggggattggggtggaagacgagtggatgtgaaatttacagctgtcaatggagtagtcaggccagcctcactgagagggtcagaggtgagcaaagacttgcaggtgggagggggttggcccattatgtgtgctggggcagaaggtcaaggcagtggaccctgcaccagccacagcagatttgaggagctgtcaggaggcctctgtggccagggtggagtaagcaaagaagggagctgtaggagaggaggtaagagacgagatgagagatgggccatataggcccttgcagacttggctcgactcaggtgtgatggagtgagtagtggcattttatttgacatgcttgtgaaggctcaccctggctacatctcaagaacagactgtagaggagtgagggtgaacgcagaagaactgttcagagacgattgcagcatttcagaggagaggtgcccgtggcttggagcagagtggtagaagtagagacagttctttggtcagatcagttatctttagaatagtttctcactcccaagtcattgaaccaaaattgcctggctgtctcctcctgtataaatgtctcattctggcccttgaccaagtcttggcttgtattatctagattagtgactgttattgacttaaattccatttgcccttctaattacggctgaaaagcaatctgtcccccaagattgaatttttattactcatatttttgacatcagtggttgcattctgtttgtgatattgcaagagtattgaagggagccctttttcatttctaatgaatcatttttaaataataattttaaaatcataatccgtaatcatttttaaaaatgatttttaaaaatccataataatcatttttaaaaatcaaagacattctcacataacattttcttagagccaccattcataatacttagctcctaaactatagacaagaatggtaatgttctacacacgtttattgtagcagcccacagtctcccagttgggcagattgaaaagaaaccgtcagtctgaagaaaacaaaagagtgccgtgttttctgttggacctgctgctgctgctacatggagtagcaactctttttacctggatcgtgaagcaccagtgtgcggtgccctaataatacctataactcatcataccacaagaaatggaaaattccacatgcatgagtctgctagggctgtcgtaataaagtaccatggacagggtggcttagacaacagaaatttattttctcacaattctgaaggctgaatgtctaagatcaaggtgtcagcagggttggtttcttctgaggctcctctccttggcttgcagacagctgtcttctcttttgtcttcagatgatcttccctccacatgtgtctgtctccgcatctcttcttttcttttcttttcttttttttttcaagatacagtctccctctgtcgcccaggctggagtgcagtggcatgatatcggctcactgcaagctctgcctcccgggttcacgccattctcctgcctcagcctcccaagtagctgggactacaggcgcctgccaccacgctcggctaattttttgtatttttagtagagacggggtttcaccgtgttagccaggatggtctccatctcctgaccttgtgatctgcccacctcggcctcccaaagtgctgggattacaggcgtgagccaccgcgcctggccttccacatctctccttataatgataccagtcatattggattggggttcaccctaatgactttattttaaatttattacctattgaaaagccctatctccaaacatcgtcacattcttaggtactggggattcggactccaacctgtgaattttgggggacacaactcaaccggtgacaggcacctttgcatttaattttcttttgccacagccaccccccaggctcatctgctgctgatgtgcgttctgtgcagcacattcatgtcagtagtctcaatttttgtaaggtttcatttgttgagggtgaaatttggtcatatgattggaacaccagtttgtgagtaaagaataatgtgtatttacaaatcatgatattgattatattgtacattgaacaaaattctgaaatagaattccaaaaatttgtctggatgacagttcattttaaataggtacacagcttctgggagcggtagttagtattgttcaacagttaggagagcagatagttagactgcctgggttactgtttaatctcccataattaccagctggttacccctgggaaagttacttaaacctctcttagtctctttgatgaaattttcttgtcttacaatgtagataattagagtttctacttcatagagttataataagaatttaaaatgctcatctacatagagaatttgggagagtgtctggtacatagtaagtgttcaataaatgttggattctattatttccagggcagccactttgaatgaagatactcatttgggtaaattaggtctggtgtgtttctgaaaatgtgttcgctaatttgtttggacaaattgtgtgtttctagggtaaggcataatttcatctgagaggataattcttgtttgttatgaataatatgcaagttttttaaaaagtggggattggtttcactcattaaagtacacggaactcctgcttgtcagcattgaactggtcttattttctggtttttggtttgtagtcctgctcctggaattacggtttggggaccacagtgtgatggcagcagcaacatgtgtgtatgtttgggggactaatgtgacatctttgtaccctaggccagacaccccacttcaataaaagcagattccctgttatctttattatgttttatagtgctgtgtaaactttggtttgagagaattcttctactataaatagcctgaaacccactagcatagtatatagattcctcatatcgtctgctcccccaacaattgcttttattctgtatataccccagggatacaactaatgttaatagtagcctgagcaaaacgtaattgggaaggcaaatctgttgcaaaaaggaatatagcataaattaattataaatcaaattaaatataaaacaatgcatttaattatctgcatcactgcccccttcctctaacatggatatctgagaggagactgattttctttctgggatagggccagatctcagcccagacaagtgaactgtgtcaacccctggaaagatggtgcttgacctccttttttgtgatatgttgggcattagctaaaggcactgctgttttggtcagctaaaatttcagtatcagtaagaggatctactacctatctgaattgttaatgcatgggctagtctttgtgtgtgattgggaacacctacttataatatactattaaatgctcatataggttcaatgatgtgttgaaccatttattaaaaatgtatttgttgaatggactctaacgagcccagcaagggaaagtgcatttctgcccaaggaaggttttcagtttgggcagcaggcattagccacccaaagctggtgctgctgttagaatcagaggaagaaccagtacgggtccatgttggatgccctctgtccttctcaccaccctaagtggtttcatctgccccaatctccatgtctgtgtgacactctgacttatgttctctcaaaagatccaatccctggccagccagagtctagcattctccaggcaggattccaaacattgttttccactgttcccactgagtacacgaatttttgtcagatggcagctcctgaattctgaagagtctggtgtcacatgccccacctctgtcaaacctcacttcttccatttgggctgatctcagctggactggaaaaccctcctctgttgaaagtaggtctaaagtggtaatgactgattagtacggacctgcaccagttcccaggtatttacaattgaaacgagtttgcttatactcagaagtgacaaattggtggatgtgataacatcaaaatatagttcttacagttgaagaacaaacaaacaaaaatcagcaaattggcagcttagctccgatacttggcaacctctggtatgagatttcctgacaccctgcacactttcccttcccctcccaacacataccccagaaaccttgacctttccttttgcaggtcatcatttaatcaagtaatcactcctcttctagcatctattacattttctggcatttctagcagcagtaagtggttgagggcaggaaccatgtcttcatgctctaagttcctagcttgctgggtgcccagtagatagatatttgaagaatgagtgagttcatgaatgcatgaaagagtggaaaactctagaatggatgttctcactgctgtgagcatccacgtaatccagtcctgttcttccctcccctttctgacctctatcactctgcggggcccatggaccccatgacgggcttacactgctgaagaggcctgtctggttttgtcacattcagactttcttcctccaaatcatctctcatagtgcagcccaattatttttctaaaaaacaaaaacacttctttcatattgctctcttgctagaaaacggaatgatttctcattgcttgagggataaaactcaaaactccttagtctggcatttaatactgactagagcttgcccttgatatttctttaaaaatattttaattgtaaatatttcaaacatatttaaaaatacaacactcatttatccactactaggattaaacaaatagtagaatttaccccatatttactttgattttctttccctgactaaataaatttattttattttattttttggagatggagtcagggtttcaccatgttggccacgctgctcgcgaactcctgacttcaggtgatccaccccccaaggcctcccaaagtgctggaattacaggcgtgagccaccacgcccggcccctaactaactaaataagcaaacattatagatacagataggccccaccccatccttctctctcttttcctaccagaaatagtcatttccctgtttatctttcacaactcacctgtgagaaccatttggtccagttagatttatcttcttgctagaatttcattctctttttttttttccctttgaggcccagttcacttttcacctcttctggtaagctttcccaccaatctcctagttctaaattgctgcacaagttattttctccattgctcaaggcagacaatattctgcctggtgacagcttttatgtagcagttttctcctagtattgattttctattccccttatagtaattttttcctcttgctttatattatagcgaattgcatgcctgtgtttcttctctactaggtaacaaccttcagaataagatctgactcttaattgcattgattcattcattctacaggtattgactgagggcttactaacaagctccaggaattctttaagcactggggatgcaggagtggacacaacagacagtcgctgccttcatggaacttaagttccagtgggagagagagaaattacatgaataaataaatatgtcaagatgaaaagtgctatggagaaaagagaagcaggagaaggctaagggggtgctatctcagacatactttaaatatgtgtctctcctttatgctctatgtcaatgccgaatgcagagggctctgggtacatatttgctgaattgcattgtctacccaaatagatactatttgattccctgctggtgagacactactcagtgtagaccttccttctgggaaggttgttataggaatgcagattttaatcctttgctgccaggagcacaccttggctgttcttcccgttatcagtagatgtacactctgggcatgataaaattgtaatactagctttagtaaggcataataagggaggaaaggtctgtttcctagcaccatatttattccgtagtcaaatggagccaatttggcatcatctttcctcctgcacttcttcgtccatcagaccagtggaaggttcactttttgcagtgttcctaactgtagtggtattgaattgtggttaccaagaagaccaatctcctctttttaattcttccagcctccaggaaagaataaaatccctcaacttgtcacttaaagaaatcactactaaggtaagtacctttatattcccattttccaaagaagcctatgaagttttcgtttgacttgattttacatctagatcttaggatacctggcttctgcaaaaaaagatgtagactttgtcaagccattttgcaggcccaatgatgagttaaaagagccaggagagagtgcttctgtcatagtggaggtcttgacttgtggacaccccagaaatggactggtttggcctttgctacaaaaggagctgtcaatttagggactgaaaaaggactgccactatgcatattgaaagcctttgcttaaagatgcattcggggcttggtgcggtggctcacgcctgtaatcccagcactttgggaggccgaggtgggtggatcacctgaggtcagaagtttgagaccagcctgaccaacattgtgaaaccccgtctctcctgaaaatacaaaaattagctgggtgtggtggagggtgcctgtaatcccagctactcaggaggctgaggtaggagaattgctttaacccaggtggttgaggttgcagtgagccgagattgcaccattgcattccagcctgggagacagagcgagactctatctcaaagaaaaaaaaaatgctttcaggatggtagtaatttgagaaattaattacttttcttcccaggagggcaatgtctggtttcctcacaaatagaacagttggtgactgtttttttgttctttaaagcttttcagttggcttgacaatcattttgcctactttatccatcgtttatactgccatagcaagaccttggtttgtgtacagacagaatacgtcttcactattccctgagagcacagtcaattaaatagtcaatgtcctcattagttaggataaccacagtttacaaaacaaaagcccttctcatatgtatttatacctggccaagttattgacagactgagaaacaggatcaattactctgtgaattatgactaaatgttgtggcagagaactgggtatgaatcattcattatttgcagttggtctgggaacgaggggtggttgtaccatggtcgaaatgtaaaaaggacagcttgctgagcagagagcaacgcagctgagagcctgttggcctggaaggactctcttccggtctctgtgcccagagaaagaaagtcttggaccctagatcaggaaacacgccaagggatcaccgcagctaagccagaatcagggatgtgatgttggcaaaaatgtctggagttactctgtgcattttctccatttctgtatctaatttatttctgaaaacaacacccagtgattttgctaaaggtcacagagccgcaggtttgatgggtaattataacttgtgtacaaagagagcttcctgttaggaacaagtggtgcccgtaagacagcatcggagccagggacccagaaatgcttgacttctgctctgctcacccaaaggttctttcacccaggctggagtgtaatggcatgatcatagctcactcagccttgatctcccgggctcaggtaatcctcctgcctcagcctcccaagtagctgggactacagacacatgctaccttgcccagctaaatttgtttgattttcagtagagaccaggtcttgctaggttgcccaggctggtcttgaacttctgagctcaagcgatcctcctgcctcagtgtgtcaaaattgggattgcaggcaagagccaccgcacctggcctctcttacattttctgctgtttatcaggtgcgtcctgatttctatgtagaattaaaagatgggaggactgtcttgggtctgagtttattgactatcttcagaacatactgtatgggtaatatgaatgcatctgtacaccaacgttgaggatacaggtgtgcctattatataatgcagatggtgcttatatgggtgtgtgtatgacactgtatattgtggatacacacatatactgatacgcacccaatattaggatttgctgaaaatttccaactactattaaagatcttagattttcccaaatatcaaaaatgggttgttttgtttgcatacagtcctactccatttgagttgctataacaaagtactgtagacgaggtggcttataaacaacagaaatttaattcccatcactttgaagcctggaagtctgggattagggttccagcatggctaagttctggtgagaggccctcttacaggctgcagacggttgacttcttgttgtattcctgcatggaagaaagagggcaaggcggggtctctggggcttctttataagggtactaatccccttcatgggggccccaccttcatgacctgatcacctcccaaaggccccacctcctaatgccatcaccttgggagttagactttcaacctatgaattctggggggaaaaaaacatctccaaccattgcacataccttctctaatacatttataaaactttataattacttcgcttttccataaaattaaggaactcacatctttgattttaaaatgtaaacataaaagccccatttgataatgagttccttggtgtccaattttatttgtaaataaaaaggatacacaggttttccggggatgtgtatgtgtgtgtgcagaggtggataggtgtgtgtgcacagacacgaatgtgtgtgtgtgttgtgggcaggggcctatattagtccacagagaattaaaacaaaactgtccagtcacacaaaacacctttctctgtactttaaactagattgaccagtgaccatgagctgagaccaaggtctcagcttgacatagctttctttctctagtgtgttagacacaccacacacacacacacacacacatacacacacacccctacctgatattctttagactcctgtctcagaaagaaatgaaaccttccttgcactcattacatttcttaaactcttatgggttacccaaaccaaaagtaattaagggataaatgagatggaagaaacagttggaaataaatgggatatctggagattggtagatattagattacatccagcagagcctgaaagaatgaacattgcaatttaataagaagattcagaaaggttgtttagtattaatattgacagcttgaaagatagatttgctcaacaaaggagaaactgactcaattatgattaacagatactgttcactaaaatcagaaatattggacatagactggatgagacataagaattatggctggtattacagagttaatggaaatgccctcagacctcagatgacattattaaatagataggatgggatgtgccagtcatctggtttgagccaaactaagacttggtgctgggggaagggatatcttccttttaactctgaaaagtctcaagactgttgaaagggtctcggaattaattactttggacatgcggatgcccaacatcaccagtgcatgctttggtttagaggctaccaaactgtcgtcttcatccagagaatgatttttataaaaaagatgttggaaaattacagccactgaatagaacatatggaagtccatgagagaaagagtggagtattttaggcaggatggatgaggtctgctttgactccaaaaataatctcaattcaaactgatataagaaaacatttaaagttgatggtgtcccacaaaccttagattcttctgggaaattaaatttttctaggtagctcattaatctgagtctagataacattggcatatgaaaagtcttgagactgttgaaagggttcaaaaaaggaaaaaaatgtgatgttttagcctccaacaaaataaaagataacctaaagacatttggaaaaagaaattaagatttaagatttttgctatttttgaaaaaccaaagaaaaaaactgtaggatgtgtttggaatgtcatgggaaaatacatgataaaactctcaaacctcactgagagttacttgtctatttttcaaatctgacttgccagcaagtatctatctgccttcaaagtttccctaaacagtgtctattaatactagtaattaaatttagcttgcagctttgaccttcatctcaatggccatatctttattcactgcgtactatgtgccaggcacagagcaaaatccctgctcacatagagctcgtatcccggcagagagacaatgtggaaacaaaggaatagaattacatggtgtatcatctgagaagaagctgtggaagaacatcaagcggagggagggccaagggaggttgctattttgggtgggtaatcagtaaggcctttcctcccaggcagcgactgagcagtctggaagggtatgagtgagccaaaccacctgggactacaaaagtgatgcagacaggaggattcggcagaggcctggagaaggcaggaggcaggagtgatgcaattatgttaccttgtggttgctctctgttagctcctatcagttttgtaattggatgtggggtgatgatgggcatatgcttggaatatgccattgctcactttatttttgttcttcttcctacatttccctccctctttcccttctctttccttcccttcctttcccttcccttccccttccccttccctccttcccttcctcccttcctcccttcttcccttcctccctttctccctctcttctttgtctttctttttccattgcttgctttttgaacattgtcttccaattacttttcatcaccccttttaattacttacaaacccagaaatctctgacctggctgttccactgccttctgatttttagctgaataaatgatgattcctggtcatttctctccccctaggtgtgtatgagtgagaaattctgcagcaccctgaggaagaaagttaacgatattgaaacccaactaccagccttgcttgaagccaaaatgcatgccatatcaggtaactggcagtgtaggagacgttgaagctatccaactaaaataatgacagctaccagcacatcgtgttttgtcctcgatgaacattccactgttattatgtcattctcagacatctgaaagcttttctgggaagtttcactaatatgcacataatatagcacaaggtgtttaagtgagtaccgtatttgggatttctagttcctgtttcttgaagagtttagagactaaatgtactctgtgtgccatatgattctagcagatgtgtatgtagcattgtgtatctgtaaatactgaatgaggattattgggtgtgatcagaccctttctatagagggaaggatggtaacatgagacaaattaatgtcctcagtttgaaaatctagtcatagaaacttggcgaatcctcaaaggattatgctccctcttactctggcagttattaaggaattgatttttccattaattagtagcttgaagtcaagagtctctgaaaacagtatcttatcctatcattagtgctttcaaacactcctctggatttgttattttattttcacaattgctatattaggtagatgggagagagaccgtgatccgaatggactgatggggaggttgaggctgcgggatgtgtcctttggttaaggtcactcaattagctaagcagtggcagatctggggctaaagtccaggccctctctcggtgtattatatatggatttttaacccagttatgtaatgacagcttcaaaaagttctctgagttttataggttgaatggacccagagctcatcagcttcaaaagaatcataaaaatttaacaaaaagttataataattacatgtatgtgttttaaatggtattttaagaaggaatacaataattggcagcttctgctcctcagatcattaaacaactaatgttggcagctaaagagcaatttggtccctggtgcagtcacgcgtattatttacaaccagtagaacatggcagcgcaaatgtggggcttggctcttaacagcttcacatgccatttacttgaaattatgggcccatttgctgagagaaaaaaaaagaagattgaacacagtcttgcttctgagttagggtttttgcctttcttaatcaatatatctttcccaggaataccggtggatgagtctgtgttaagcccaagggaagaaatgtataattcaggcagcagagatagcctcactccaatgtgaacaatctctcttcagactccagggaaaatgcccaagatggtatattgcgtatggcgcaggtttcctgttttagctctttggtcagctgagaaaattggtgaggcctgatctgctgaaggatgacctgaattaaccctcctggtaactgaccttttgacctcactattttctggttgctctgtatgctctttggtggaccggcctttcagtcaatgggctgtccccataggtgatactagtgttaaggtggtcaacatttgtttgcaactcctgcatataatgctatttctgttttctcctgtttcaataccttcagaatgggcaaaccctcactccattaggtaagattcttaaaagccctattgaatggaaaggatcttggtttttttttttttttgagtcagagtctcgttcagtcgcccaggctagagtgcaatggcgcgatctcggctcactgcaagctctgcctcctgggttcataccattttcctgcctcagcctcccaagtagctgggactacaggcacccgccaccacgcccggctaattttttgtatttttagtagagacggggtttcactgtgttagccaggatggtctcaatctcctgaccttgtgatctgccctgaatggagaggatcttaagggaggtccttaagattcttagggggtcttttgtctctcttcaagtttctatgattcgcttagatttatagactgattgatatggtttggctctgtgtccctacccaaatctcatctcaaattgtaatccccacattcaagggagggacctggtgggaggtgtttggatcatgagggcggtttcccccatgctgttttcgtgatagtgagtgagttatcatgagatctgatggtttaacaagtgtttggtagttcttcctgcattcattcttcttgccaccttgtgaagaaggtgccttgctttccccttgccttccgccatgattgtaagtttcttgaggccttcctagccatggggaactgtgagtcaattaaatctattttctttaaaaattacccagtctcaggtggtatctttatagtagtgtgagaaaggactaatacatccatcctgactttgatctatggcctgaggtcctttcttaatttgagaactatttgccatttgcagagagtaggaataacaaattagtttcattttcaaacctggccagatctagctcctttacatgtaacagtttattctttaattcatctctcttctcttgcatttcatcacaggcattgacaggaggtcagtgggcacttctgtattctgcctggaaatctccttggatgtctaactacaattattagggactcttttttatattgcctcagttggtaactgagtgacttttttgccactacaaggatctttttttttctagtttctgatatatttttcttacttttttctatccttcacggaggcccatgaggcttctgcctactaccaagtcccaaaaccaatgcctcgattttaggattttgttacaatagtatcccatatccagataccaaaatctattttcattatctactgctgcctaataaaaaataagtcactttaagacgtagtgacttaaaatattaccagttatttattttgcccatggaaatacaatttgggcagggcttggcagggacagctagggtggctcaactggggtgggagaatccacacccaagacggtgcatacatatggtctggctgttgagtgctctctatgtgggcctctctataggcagcttggcttccttacaacatggctgctgggttccaagagcaagtgtcccaagagaaaggaaatggaaatttcttattcttaaggtctgaattcagacactggtatgcatctctattaatgtgtaataagtggctcctcaaacttcatagcttgaaacaacaaacctttatctctcacagtctctgagagacaggagtccagagtgacttagctgggtggctctgactcagggtctcataaggtcgctgttaagacacactttggagctgcagtcgtctaaaggcttggctggggctgaaagatctgcttccaaactcatgcatgtgttgttaacagacggcttcagttccttgccacaagagctgtgccctaggacctcttgcaacatagcagctgatttcctcagagccagtgatctgagggagagagaccaaataagacagaagccacagatgccaggcgcggtggctcacgcctataatcccagcactttgggaggccgaggtgggtggatcacgaggtcaggagatcaagaccatcctggctaacatggtgaaaccccgtctctactaaaaatacaaaaaattagctaggcgtcatggcgggcgcctgtagtcccatctactcgggaggcggaggcaggagaatggcatgaaccgggaggcggagcttgcggtgagcccatatcgcgccactacactccagcctgggtgacagagcaagactccgtctcaaaaaaaaaaaaaaaaaaaaaaaaaaaagccacagtgtcttgttaggacttagccttcaaagtcacacagcatcacttctgcttagtgactagaagcaagtcactaagttcagttcagcccacaggcaaggggaaggaaacaggttttaccccaaaggaggagtattaaagaatttggtgggcatatttttataaccactgcagtgttacttccattgtgttttattggtccagcattcctggtgtgctgattcaagggaagggccactataacaagtctcaatgagaggtgtgtcaaagagtttcagtgccatgctctaaaaagtgccacagtatttattgagacagaaggattttgagaactgaagacctggacagagagcttttcagtcagaggaaatggcctgttccatttatttactgaaaagaaaaatatcatggagcatctaggaagtgtcagatctggttctaggtactgaggatgcagtagagaacaggacaagatcccccttcctttttttttttttttgaggcaaggtgttgctctgttacccaggctggagtgcagaggtaagatcatagttgactgcagccttgaattcctaggctcaagccatccttagccttagcctctggagtcacgggattataggcatgagctcctggctcaatgtctcttcttttttgatagctgtgttctcccattggccacagtggaatggagctagatatgcctgggctgaatatggaggaaaagctcagctatttcttcaggaggaagagtagtctagattggcccaggtataggattagtattgtggtagctcttcagagttggttaggaccaggatacacagagctctgaattgtaggctaaggataagagcattttagggagccattaccatgttttagcggagtagtgacatgattaaaaccagactttaggaagcgtaatccggccatgttgtacacagagggatggatgtggcaacaccttgggagtcatggaattaactaggatgttagaaatgaaaaaaggaagaaaagtaggctagtataggaaatctactacagataggtaattattgatttttggaagaaccatgatgatattaatatatccagttgagtgtggtgtaatacacattaagaaaagtaatttagagagcccattgtttctctcccttttcactgtacacaccttaagtgtgttttagtcacctctttttttccattctctatttctgtttcaattttcctgttcagcagaggatagtttggtttaaagccgatagcaaaagtggattctgttgttgctgtccttcctagacatatcagtccgttctcacactgctgtaaagaaatacctgaggctgggtaatttataaagaaaggaggtttaattggcttatgattctgcaaattgtacaggaagcatggcagcatctgcttggcttctggagaggcctcaggaaacttacaatcatggcggaaggtgaaggggaaaccagcacttcacacggccagagcaggaggaggggggtgggggaggtgccacgcacttttaagtagccggaccttgtgataactcactatggcaacagcatcaccaagagggatggtgctaaatcattaatgagaaactgcccctatgatccaatcaccttccactggtgctaaatcattaatgagaaactgcccctatgatccaatcaccttccactggtgctaaatcattaatgagaaactgcccctatgatccaatcaccttccaccgggccccacctccagcactgaggattacattgcaacatgagacttggatggggacacagatccaaaccatatcactagtgaaggaaagtacagccctgagctctatgcatactgacgtagaggaagaaactcaccagggcagagagatttctcagtttttgagtgcaggggccatacagttagtagagagaaacttgggctttggaatctgagaagtgtgtgttcaagtgcagctttatcatgacttggctggatgatcttgggcaagttgtttaaccttttcaggtcttgtttcttcatctgtaaaatggagctaataataatattgcccatcacattaggttgttgtaagaattaagtgaggtagtaaattagaataatgtggtacatcagtatattaatacatgagataataaatatatgaacgtgacgtggctttccacagagtgaatacatgcttagctagtgattgttagccatgcatctgagttgggggagacccagccagtgggtgactctctgatcaggtgtcactcagtgctacaggttcccggccagtgtacctgtagtaaaagggcagcggtggcatccatacctcttaatccaaggcagctttggcctcagtgcctgtgcagtctcctgactggccaactaggctgggccacttgtcaatggggtggattcgtttttttgtttggttttcagctccgagttcaaaagcctgggagacctgctggcttctctcccagagctgggccacatattgttaacctgggccctggaggtctgatcagtgtcctggctggatccagtgcagtaagagaagccaaggagaagacagtcttccaaggcctgaagcaggtctgacctaactgcccaatgtaggaggtttgccctgggacaaactgaggtcctgcagggttcgagggtgaaaggcctcttctcccaggaggcagccccagacccaccttgctgaactggctgcctggaaaggaagtgagagcgaagatctcaaaaaagagcagctctttaacctctgtgctgctctcactgaacgctcccgccctctgcccaggacttgatggctttggccctggccctggggcagagcgaagggaaagcgtcagtgccctctagggccgagagtgtggcactacagcaagtgtgtggtgggtgcggctgacttgtgctctgtggctactacccatccccatcagaaacctgggcctgtttccttctctggaatggtgctgggactttccaaaccacggacctgtagtgatgagagttggtgtcttgagtccgcgtccaccgtctgcatgccatgcctgccttcccactgctgggggccctcaaccctcctccagttcccgtgtctaagacttagcaacaagcatccttcctgtgtgttggactgcgggtctgcaccattgtgagacacggtcctatattgggccctacctctatcggtgctcgttgacctgactggtatcacagtcctcatctggaacggggccagccaagctctggccactcccttgtcctgggacgaaggctcagcccctgaggcccggcgagtagtcaaggctggctctctgatgcctggctgctctgatgctggcatcctgcatgcacttccagctccagccttgtcctgctcaaattacccctcattattgatctggtccatctgttgagtcaccctccaatttttttcttccactttgtttaatgcctggcactcaaaagacagccagtagaagtatttgtttttcaaaaaatggaccctcattcattggttgctgatccctagaatctgttgttttcatacctccttcacttgttaagattttcatctcctgccctgacttcagtgggtacgtctggttttaagccccggtcctccttctcataggatccatcctctgtcaggtgattggagctggctgatgttccagcttctggatgctggaagccagcagcagcagctgcctgggtgacagcctcactgtgtgttggcaggcttctcactcaccttttttaatcaattggacctgaaaatcttgaagctaaacaaacacagccctgctattttggcacaagatgaaggccagttttaagtggtctataaaagctgtgaaaaaaacttttaaaagagaattatatccagggcacccaagctgcttccagatgccagaggcagccctgcatttaataatatgcttgctggaatccctttaaaatggtagatgttggccatctttttcttttttctttgcattcccaatggaaggacttccaatgtatggccctggtattattccctgtatgttttagagaagctctaaattcctgtagccgtcaaacttgggtttttcactcagactgcatgttaggatcatctggggaaatttaaaaatactggtacccaggcagcaccaaattccttcggtcagaatctctagggatttttcctgaatataggaaccttcataaacagtttccaggtggttttaatgtcctgtgagggctggaaccaccgtaccagtgagaggagagctggcctgccctgctcactgctggcagatggactcttgagtcacatctttgcacacccagaagctccaggcccaccgtgtaccatggctaagtagctgcaactgcaacctggccttggcctggaagcacatcttgtaggatcactgatgttactctcccctggccttccccttgtcctggaagatgtgcctaaggctgagagacttcattgtttaattcatctagctgtctgttctgagagcccccagctaaactgaggttccagtcccagaacagctagcaaaccgccctaaggggaaatgaaggggagatggacatggtatttactgcgtgcctttcataggatgctgcttttacctggtagatggcccaatgcctagttgtctgacctgtgaccaggggctcctcgcctgggaaacttgtttatatgtctttgtggctcttgcctttcctgtgttcagtttatgcccccctgcccattgctctggcgctgggagccaaaccttgtgctctcttgggcatcccaggtaaaacctggcctggggcatcccctggtcttcagatggaaggtgcaaaggcaatatacaccacagtaggaaacaaattcaaaaagtgtaatttacggatcctgggcagggagggcacagagagtcgggagggcagtcctttgtccctgggccactccagataggaatgaagcatcatgcagagagagagaaacaaggcacatggcaactggcagtgtgtatagggagtagggtctgggccactgtaagttttcaggcaaatgtgtgaatggcctgtttaaaggaagcaatggggaagcagggagcccagtctgctagtcaggggagatgtctctcagtttttatctctcgccactggcttgagccattgggtgtggtttccttctaatgcctgggcagctgtgtcattcccgttacagtcaccacatgattctaattgccttagaatttataggaaccagttggcagcccaacaagtgggctcctctggccagtgagggagcctggtgagggaatcttcccaggacaggcagagacatctgcctggttcttagattggccatctttggtctcacctcagtttggatatattttttttttatctcacctgcccccttgttatctgcttccaagaagcaaacagctcaaataattatttattttaaaataacataagaggatgtctctgatactccaaaagccttttttttttgaaaaaaaaaaaaaaaggatggttctatccaatttggcatttcatttatagagaataaaaactatctatacccaaaatgtattcattgcacacaattgtattttaatggcagctggaaatcttctctcctaactgatgcttttggggaaaataagaacatttggacaataaactagattttctagataaacacaaaatgggtgaatttcacacatccaataatgaaagtagttttttccttaaattagaaacaaggatttaaatttccgtcttcttctgaatgaatatttggcacccaaccaagaaatatatatcattttaaattttcttgaggaaatatccttttcttgcataattaatttaaaggaaattaaattgaccatgtcaattgtcaaacaaggaaaagtaagaattttgcttatttgttattaattttatttacaatagtatttaaaggtaactttgtaaaataacccctaatgatataatctaaaataaaatagattgtatttaaatcacttttttattatataccacgaaaaactactgaatgattaaaacattcttaagtgggttcttaacattgtatggaactggaaagagcagttcagatcacagaggcatgggcactgtgttctaagtggtcactgcactgattcagaacagcaggggctggctctgtactgggtgggtgggtgctcaaggccagacctacacagtgctcctgtgtctgcagctgcagggaagcaggagaaacagtgacgatggtccaggagaggccacctgacatatggcagaaaaacaaaattcagggtacagacagtggctgggagcatcaactcaatcgctttctttctttactattttccctctttctaaaaaagtctgtgatttagatcagtggctgcaggagggagacaagagacccagtaaagatgttttcaaagatgatgcctatctggtgtgaaaagaaatgaagacctacccaaagagaataagcacaagctattatgcagagcttgctacagcaagggagtcagacaccatcatttgcaatttggcagagactcaaaggtgggcagacgagtgggagagctttatagtggaaaaaggcgaaggcttcaggtgtgccctgattggaggttatcaatgcggggaagctggaggcggctcactagaagcgaacatcctgtgtgcttggtcaggggaccatatttggctttctctggtgggtcctaagttggaatcggggacaaaaattagggaagccatcagttattaatccagtcctgaacattttgagtcaattgttacagaagttattatttagcttcctggatagttactagagagcaatttggcttccagcaggtctgatttagagcaggccagcttccggggttgctttttgtgggtaagggtattgttttctgggaaagttgctgcaccttgtggatcagagttccatcttttgctatggcctggctgttgtccgattgtatatttagtcagtcaccaggcaccacattttctcaagctgttggaaagttctgtgtgtccagtgttatcttccccttgtattctatgaaatatatggctgtctgaaatgtttgatgtgcaaagccagccatggggctctgctcacagcaaatgcttttggctatctcaggaagtcatggtgactggaagaaatgcacaaccctgacagaaaatggcaaattctagctgaagggacctccagggagaagggggttggggaggggagcagttggctggggcttcttggccgcctccattgccctttggttcagccagcccaggctcacagcagatatccttgacctcgccaagggaaggctctgaaagacaaaggtagatcttgatcttgcttaactgtgcacttgagcttgcagttccttgaaagatctggtgtcacgcaagacaaattatacagcagtctactatttctggagtttgatcattctcagcactggctttatttctttttttccactaaagaagtatagttcaaatgtggataggtgaaagtagataatcttaggaggatcgttacaaactgaaatgtccatgagttcaggaaagtgccatgtgtgtgaggggtaccccaggtgagaggcctgaggattgggcaggtgaaagggaccatgtgggcacaggattcatccccctcaccatgtgctttctcactttagtgatgatttctacccaggtgttgactaagtcacttattgacatgagatcagaagaaacaagttcaagttcagcaatctcgcatgggatcttagaactctgaaactctgtgaccttcacaaggttacctctgggtctagattttttaactggaaatcaaggacaatcattaagagactccccttcctggattgttgggaagattaaatgatacaatccaagtaatgagagcattgtagtctctaaaattggattctcaaataatgacctcaggtgaaggaagaactgttcaaaatgccccaggtgctatgaagtacagagggcaggtattttttttaagggatggggtcttgctctgttgctcaggctacagtgcagtggtatgatcatgactcactgccacctcaagctcctgggctcaagtgatcttctcacctcagcctcccaagtagctaggactaaaggtgcataccaccatgcctggctaattttttaatttttttgtagagatgggggtcttgctatgttgcccaggctggtctccaactcctcaagcaaccttcccatcttggcttgccaaagtgctgggcttacaggtatgagccaccacacctggctgatatttgaattcagagatgctgaggataagtaatgttggaacagagtgggtaaagtcagcttcagcataaattgtgtttatttaatttaaacacaatttaaattttgtgttttggctatctcaggaagtcatggtgactggaagaaatgcacaaccctgacagaaaatggcaaattctagctgaattttaaattgtgttatttgcggaataaaatatgtggacaagtgctttaaaaaacctatgagaatacccaggtttcattcccttgttgaagagcaggcgggcacaggcatattgggatgccataggtggcatattcttctccacacacatcctccttggcatttagaaagggcctgtgaaagttatgaagattcaggtcacagatctctgatgggactttcttcaggtatcagcattgactttccaaattttcatcactgagctcctgaccaatttcagcagtcagagaggtctgcatcaagcaaggtcttggtctaagcctcatgggattagatctgaggtcaaaatgcctataaagtattgatcaagggcattgtagcattttctcatggcttgggtcttgatatgaatggtctctttgggaattcacactcactctgctcttttaaaatgttcacttttatcactgtgcattttcccaagccttatccctcaggatcaaagaaagggcctaggctttaattaatgatctctcctatgttttaccaagggcactggtctctcgagcttgcagtgggttgcaagggattagagggtgtatttgcagcaaaacttctgtaccggcactcgctctgtatatatagtctcttccaatctgcttttagagatcttttctttctgactgtttgcaggaggacatggcacgctgtggcatattctgcctgatgtctctggaggcatagttggtgcccatcccactttttattaactctcttggttgaaaacacagcccagaagacatgttgggacttcataagcacagcctaaggaggaacattggaaggtacaacattgtacatgtggccaccctgccccaacgcagtcacacctctgtgctggtcctcctgcgagctccccagagcatggggtcccttgaggttctttgtggcatgcggtagggggctcgatcctcagcttccttgacttggccattgttcaggatggaaattaccgatccgggaaaagttttatttgaggttactgtttacagcttgaagctcatggaagtgcagtctgctctcctgtggactttgtgggtttttcctaaatgggtccaacccatcagcttggcatttggggcactattgttttgaagcaacttccttgtgagtttagtctcacctcctaccccttgcccattgctctctaacctgggttcctgtttcttcttttgggactcttatattcttccctcctgaaatctgcctcagtctctccttctggaataatctctcttctcctctgacctctcctagtatttgttttttctttggaaggcaccttatcccctttattttatggtaacttcctggagagcaggagcagtacttgttctcttttgtgcttgtcatgttgcttaaaacacatgagtgttttaagcagtgagagacaaacacatgagtctcaatagggtctttatccaatcatggcattggaaactatggacttcagtgacagatgttatgtgctaggtttcagaatgcctttaaggtgggaaaacattttgtatcattttcaacatttgtatcagtttgaaatctgcctgctaagtaacaataaaaaagttagcaacataatttatgtttaaaaggaagtgttctggggtgatgttcgagttggaaacttgccctatgctttactgcattgtgatcttcagcaagatattttagttctccagatttccgctttcccagctgtaaaaggagacaacaatatgaatttcagtgaacataaaaagcacccattattttatacattgcaaagaaagaaaaattgctgtcaattaagcagtaacagtgctttctatggtttagaatttttatcttatacttaactgatatagctcttttagatgtatttaggcttttgaaaaatcacatatcactcattaaaaaggaaaataaattggttaaggttttccttggcatcttcttcttcattctgagtcttccgaaacacatttggactcaatgttgtcgaggtttgtgtttccccacacgtcatcatcctgtgaaccattgaagttgatgggaggcaactttttctcccccaagaataaagagttttctgtaggattgtctgccaaactgctaacacctttcttcaagttttgaatgctggtgctttcccagtcttacaaatccacatcaacacaagattttcaggcaacagccagtacgcagatggtcctaaaatagtttgtacattgaaacaccagggggttgcagatggtcagccaggccagggaaaataatccagttataaccactgcatcctgaccacttcctggctgatggtgattgtaggacacatccctgtttcagagatgttaaaatgtaaaataataataataataataataataataataataataataatataagatataacctgtttcctaaagttgtgatgacatttaaaggtgagaaagtttgtagctattattgtgattatggttactataaattctgagaaaacacagtggggttttctaattaacactaactaatttatgggacactcattaatgttatatatttatttattgttcaatgttcatgcttaaaaatttcttaatttttcctctttttaattgaggtatggtttatattcagtggaatgcacaggtcttaagtgtttacagttcttgaattttgacacctgtgttacgaacagccctaccaagagatagaacagtctcatcactcaagaaacaacaccctatcttgtcccagtcatcatcgtccctcctctgttctgatatcttctaccatggattaattttggctgttctagaacttaatggaatcatgtggcactactcttttgcatcttttctaaagacatgtacatgttggctgggcgcggtggctcacgcctgtaatcccagcactttggaaggctgaggtgggtggatcacgaggtcaggagtttgagaacagtctggccaacatggtgaaaccccggctctactaaaaaatacaaaaattaactgggcgtggtggtgggcacttgtaatcctagctacttgggaggctgaggcaggagaatagtttcaaactggaaggtggaggttgcagtgagctgagatcgtaccactgcactccagcctgggcaacaagaacaaaactctgtctcaaaaaaaaaaaaaagaaagaaagaaaaagacacatacatgttgctgcatgtatgacgagtttgtttctttttattgctgagtagtctttcattgcatagctatagtattatttttgcatcttcctgctgatggatatttaggttgcttccagtatggggctggctctcaggcataagacactgtgaccatttatttgagtgcaaatatttttgatgacatgttttcatttcttttgtgtaaatgcctggaagtagaattgttggattaaagggtaggtatacattgaactttatgagaaactggcagaacttttcttgaagggaccattttacatgcgtgagagttccagttgctccatacccttgtgaatgttgacatttttagttgagttaatttgaaacatttgagtgggcttgtagtggaatatttatggttttaatttttcttttcttaatgattaatgatgtcaaatgttttttcatatgcttattagccatttgtgcgtctactttgtaaaatgcctgttaagtcatttgaccatttttcaatggcaccatttgtgttttaattgtcaagttgtagtattcaattccttgtcagttaaacataatgcaatgattttctccaagtctgtgacttgtcgtctcattttttagttgtgtcttttgatgagaagtttttaattttgataaagcccatttatcctttttaaaatagtgttttctgtatcttatctgaagttcttgcctactccaaagtcaatcaaatattcattttttttttgtagaagctttatagttttaacttttacatgtaggcctgtgatccacctttaattaaatttttgtgtggtttgaggtatgaatcaaggttaatattttttccatgtagatagctagttgttccagcaccatttattgaaaatactttcttttcctcattgacttgctttggcactttggttggctgtatatgtgttaatccactcctggactgtttattctattccatcgatctgtttgtctatgtatattcaatgccatattaccttgatttatagtggctttagcattagtcttgaaaccaagactcactttttaaggattgctttggtcatcctcctcctcctcttccttcttcttctttcttcctattcttcttcattcttcttcgtcttctccttccttccctccctccctctttcacctcctcctcctccttcttcttctttctccctctccttctttgaggtggggacttgctatgttgcccagacaagagtgtagtgcctgttcaaaagtgcaatcatagtgcactacagcctcaaactcatgggctcattcttctagattttatttgtttagatatgaagtctcactctgttgctcaagctggagtgcagtggcaggatctcagctcgctgcaacctacacctcctgggtttaagtgattctcctgcctcagcctcttgagtagctgggattacaggtgcttaccactgtgccagattaatttttatatttttagtagagatagggtttcgccatgttggccaggctggtcttgaacacctgacctcaagggacccaccacctcggcctcccaaaatgctgggattacaggtgtgagccaccatgcccagctcactcttagacgttttagaataagcacataaatttctacaaaagaacctcataacattttgattggaattatattaaatcaatgaatcaatgtggggaaaattgaaatcttaccaatattgaacttccagtgtatgtatacagtgtatcttttaaattatttgtctttaatttgtctcagcagtttttgaaaaatagttttcactgtagagctcttgcacatatttaaagaaagtatccctcagtattatgagatttaaaatattttgtaaattgtattttttaaaaaatcatcttctagttttttgttatttagacataagattgatgtttgtacattgaccttgtatcctgcaatcttgctacatttaatttatcatatatttttctcagtgctttacagaatttcttgtttattcttgtaactacctatgagtcaggtgttattgcaattatattttataagaaatttgccccagatgtgctaattttcttgctccaggtcacacagtttgagtaacaggggaggaatttaatttaggtcaactctgattatatggcccagtccccttccacactgctataatatgtcatctctttgacatttgtatattattggaatggagtgacacattgtggtttctctggattccactgggacatttttgggtcatcatactttacgggagatggcttcaccaatggaactcctaaaatggacataacaagaataaggtgataaaaaagacggtgatttttccagtttaaggagagcaatatttttccaggttctttccccagaggactgctaaggaaattgtacataatctcaaagtgcagtttctttgcccatgctgtgaatgtacattagctgctgctagatcttccatgtgtgtggatgctgtaaagcttgttttcccttcttctctcccacaacgtgctgtaggaaaccatttctggacggctaaagacctcaccgaggagattagatcattaacatcagagagagaagggctggagggactcctcagcaagctgttggtgttgagttccaggaatgtcaaaaagctgggaagtgttaaagaagattacaacagactgagaagagaagtggagcaccaggagactgcctatggtaggtagtgcacaactgttccccggcaagatattgatgatatttgttgtgttttgtggccaggcagaatgttctgtgccttatgtgaacgtcactgtgaagagcgtcatggagcacatggcccttttccttggggacatttttggcaggtgccttggcaaaccgaatggaattacttgtcagcttttgttttcatattcacatgtgacatcttttctttttctgttccctgtctcaacctgtgtttgctaatagccttgttattatttagagcagtctctcccttggcaaggtcttgagcattttctttgtgtgacaattatcttccttttgtcccttggctccgtctccttgtctgcacaatcatagactaaatcaggctgatctgagaaaattgagggaagaccataaagtggctcttctatgtgtggacttttctgagagcttctttccccaggaaggatgatgtagaagatgtgaatgccgccttagccaaagtgtctgcttgtcagaggagttcaagtgttcctgtgttctttccttttccagtcgttaggagtaactgagcttactctgagatttgcacccagagggatggtctcagaagacgctggttcagtgcaaattgagatggtaaaaacttatttcttaaaaaatggttcctaaataaatgtcatttactaaaacaaatgaaagaaatatatatatgaataaatggctatattttacaaagtatgcttatttaagaagaaataagaaaaaacggggctgataggaaccagatttgaaatagggcttttgtaaatactccgtaaattgaagtaaatgaagagtagtatttataagctagattgagaaatataaaatcagctagctgaagttaagtgcatcaatttgggatgaataaattttcttttaaaatgtctatcaatttgtgtagagagaggtttcttcatagagatattagaatcaaagagtatgttcagtagttattctgtcttctttgtaatgaatacccttaagttggcttaacagctcagtacttatctttttttcttttcattcttaaaggtcaagccttgtttttgccgtatatgtaactagagacagtacgtttgaggctaaataactgtagtactagggaatgacaacacgctcacccaagacaccgcagcctggtttactctgtcatgataggaatgaggattgtacatttgaaataggtttctgctattgattttttaaatgtataaacgatggaaactacggaatttctcatgttttcaccacatagttttttgtcataaaatgaagaatatattatatccaagaatgaagaggaagtgaacaaatttgagcaaatttagtccagcaatattttcatttgaatagttgagcccctgaaagccattaatatctctttttaaaaaaagaaccatgcagtatttttgaatctcatcatcgtcacttcactaagtattttcacaatgatgaataaaacataaacaaatggaatgagagattgttaccatggatgattctaaattgcagatggctcattactgttgtgaagcctctctttatgtttttacacttggattttgctggatcagccaccctttccctatacattgatttacacgtgcttaattttttttaaccaatttgaggtgagttggctttaggtgaaccaaattaataatctagggttgagagtgtgggaaacaaataaataatgaattcctgaatacattgaagcttttatttattaaaatgtgataaaactggggcaaagtccatattcagctttttttgtgttttgagggttaaaaattcagagggagctctgtgttcaagtttaaatgtagagaaagtacaaaggagagtgtacttatgcacatacacatatgcatgcatgtaccatgactctttttagccttagagaatgaaaccatttaagaaatgagcaatatgtagtattcttaaaaaaagattttgatttccaacaatagttgtggaatgcagcgttcaggggaaaaaggcaactcatggatgatcaagccaccctgcttgtcaggaacccagactcttctatcttgttcttctctgccccacaacatgtgccattcagtccaacctggctgacccagccacatgcatgtccaagtccagtcagaaaaaaaacaaagaaggaagagagctcatctatcccctttaagtacgcttttagaaatctgcacacatctctgctacggccacatccctgtgaccttaaccttgttatatggtaacagctacttgcaagaggggctgggagctgtccttaccctgggcagcaatgtgccccactaaagtgatgaattctgtttccatagcaaaaggggagatttgcagtcttagggaacaattagcagtgtctctcgtacagagaccttttaatgatgtgaagtgtatctctaatgatgcacctgagatgaatttgctgcatgcatcacttaaaatatcattgtatcttgtgtctctggctagattgtgagtccaccgaggtcagaacattgttcttaggtttcactgtactgctttggtgtccagcatgatgtcttttaaaatagtaaatatactataccatcaatatttgttcatttactggggccagatgttaaaatgacacatgaatgagtcctctcttcctgcattttagattgcagatctggaccttgaatcttctgcttctttattcattttccaaattaatgagggtagtgataagtttgtctttcttggaaggtgcttgagttgtctgagttggatattcagtttggagtgtcagtaatagaacaatacggtgatagaaaaggaactgaaatatgccaaggtactcaagggcaaagggagacagacctcatcaccgaatccattggcttttgttgccaagacacaatctctataaagagatgataaagaagtgtgctttaactcctgtcagctgttcttgagacttcaggataacacatttgaattcggagcaatgttaagtgcagtgaaatagaaggaaaagctaaatctatcttccaagccttgaatatttatggaaattaactataaacatttaattattgtggattccaatgtgtgtgtttatttaaagaagggtggaatgaaaaaaatcagcaacttttacagtttgctacatctgcttttttttttttttttgagacagagttttgctcttgtcacccaggctggagtgtaatggtgcgatctctgctcactgcaacctccgtctcccaggttcaagcgattctcctgcctcagcctcccaggtagctgggattataggccagctaatttttatatttttttagtagtgacggggtttcaccatgttggccaggctggtctcaaactcctgacctcaggtgatccacctgcttaggcctcccaaagtgctggaattacaagcgtgagccaccgcgcccggcctacaactgcttttcaagttaaaaggacagccctcagatttacgcagcagtttttcaccatcccttgtgtataaattggtaatctgtattgtactttattaatattgttgatttcgcactgtaactcagctataaaggaaaccgacgtcaaggggagagatttaatcacagaataatcaggactagaattttaaataggacatcattagcatgttaatgaattttcccaccttatgccagctgcctgagtagaaaagatactgcagatgtagctcaaaaatctggctggttccctggcccagtgagctgtcaggaatctgtgtagggtgatccataagctaagtgaagggattctaagtgagaataccaagcagcaagattttgtttttctgagaacgatggctaactgtgcccagcctaaactcatttgtctttcggtgagtaagaggggaatgggaggcagagaaggggcagttgaagggcaatgaggttggagtagaggcacctttccaattatggtttgggattaggaccttttgctttagatagaaaagttgtaagttcgcaatgacaagatcctgccctaattcttggcacagtctcacaatttttgagcttgaaatagctaatgaaaggaagcatgagtgtcttagtccatctgcgttgctatagaggaatacctgaggctgggtcatttataaagaaaagggaattctttggctcacagttttgcaggctgtctaagaagcatagtgccaacatctgcttctggtgagggcctcaggctgcttccactcatggcagaagatgaaggggagctggcctaggcagatcactggtgagagaggaagcaaaaagagagagaagggacatgacacactctttttaacaaccagctctcccagaaactaatagagtgagaactcactcattgatgaccaagctattcttgagggatctgcccccagacccagacacctcccattaggctctaccttcaacattgggggtcaaatttcaacataaggtttggaggtcaaagaaaagaaactatagcagtgacagattatactgagatatcggtttaactctgaagttcccagatgcagctacttgcagaatttcacttcacacctattaagaaaagtcttttagtttagaaatcctgtgagttacaagttctgcatatataggcagtaattcttttttccatatatgtcagatatatgtagaagaaactgatgaaaaagtagaacaaaagaataaaatctatgggtctcttttattggcagggagagggaggaaatggagagccgggacaatacatacaacaaagataaaaacaataaaattagcaaacaacaataaaatttaaaaacaaagacagaagaaaatgccaatgtcaagtgttaattatttggttgagaatatgatgtgataatgaacttcctagaagtcacagcaaagaagacagttgaagcatcatccttcttcctcaaaagcaccttgaaaagcacagagctttttgggaattcagagtgatgctaaattcttcaagacacttctcttgaaagcatagtggaaagtcctcctgaacagatttataacacatgcagaaagctcttttacttgtattattattttttacaactttttattttaggttcaggaatacatgtgcaggttctttatataggtaaattgcatgtcatcggggtttggtgtccagaatattttatcacccaggtgataagcatgttatccgatggttgtgaccaactacctctaggaaaaaaacatgttggggatcccttcaaagcaggagggactgtgcacaggagagactgaaaccacatacacattttagatatgtaggtatggacagtttttcccacaaaaagatccagtttttcagcagatttttaaaggggtcattctaagagtcctcaaattttaagaaacattaagatattaaactgtcgaggtgaattagggcttgggctagtgaagtttaaatacggcatcttccaatttctgacattatttcaagatgtaacttagcacctaaaaagtggctggagaacatatcctgtacactcaccaaatgtcacttctttcctctgagctttggctacgacctatgtataagaaaacttagctctccgggccagaacggtgatagtgctcttgataacagagggccaagccgtctgctttggaaccagatgagtgttgcggtgctatgtggcaagaaatgtagatgtttatatgggaaatagatatgtgtctgcctttccaaattcgaaatctttggtcatttagatttaaaaaaaaatgtcaaataggatcttttggaagaaataaaaaaaattcaaaatcttttccctcaggtttttctgataggctgaggttttaaatctctaatcatttatctttgatttgccttattgattacattatcactttatcaggaccctgactaaatctgtttgtgtttttaatttctctccattttttcctttccagttacatccttgcatcactattagtgtgattatttcccttcagccatttttgcctgtgaatttctaagcttgaaatttgcagctaactttctccctcctttattaagtcgctgtgataattcttttgggaggcatcgccatacagtggaaaaagcctggattaggatgtagggggtgtcagtttaatctcagtcctgcccttccctaatcatctgcatagcacctgatatatatagcatcagaatgtgaggctcaatgagtgaatagtcttcagcaactcactgaattttatctgagtctcagttgcttcatatgtaatactgtagaaccagatcttgaagttgcatttctatccatccatccatccatccatccatccatccatccacccatccatccatcctttccacaagcatttattgagtacttacgatatgctaggcgctgtggcaggccctcatggtccagagatgaattagatagtccctgtggctactgaggtcccttttaactctagccccttgtatgtgaatttccacaattcaatttatactttgttcatttattttcttgctctcagctacttttgatctccttttcccacttttatccatatatatttttaaaagtccctactattgttacatcttttttcacttgtctctctacttgtttctatactcccttaaaatacgtaagtcacttaccccctgggtggaaatacaatgatgttttcaattatatttcataccaaattgcaacaggcagttttttttaacatgctaattcatttagagcagaaacttgactctatgtaatagggtgggtacatgtgtctcttaaatatctgccagattttctgctttgtagattattcttactaatcagtgcgtattagagtctctttgtacatttcatatggactctgggctttgataatgttggtagacacatgtactcacacacgctcatataatgtcctgaagattaagctaagagtgatggtaagtggaacttcatgatcttaaagaagagcctgtttgccatgttttgggtgaggggattattttttgcatggggaccctatcatgtattgcagaacatttcacatccctggtcattgcctgcatccaactcttcttcccacccccatttttcaatgcccccaggtaggagtggtaccaccctcagttaactgcataacttcagcctaatgctttatgttttagtatcattcctatgatttgaaaatatgttgtcatgatcattagaacttgcctggaattaataaaaccaaattctattattcacattatctttcatatagatccttagaggtttaaatataagttctttgcagatttcttcctccattgctctttactgtgtatattcagtatgtatttcttgggcacagatttctgtatgcacagatgagctacagctattgtggatttaatgttttctttgaagaaaaggaatgatcccttgtacgaagtcaccctctttttagtaacaaagacttatctctttctttttgtttctcaagcacttgagaactaagcactgtgctaagacttgacatactttagtcatctcatcctctggaccactgtggtactggctccactggaatctctgttttaccgatgaagaagctgaggtttaggaaggatcctgtcacagagccttcagggggcaaggccaccatctgaatccctcttacctgccattttacctttgacgttgctttatgttctttatgaatttgattcctaacgtcagtctctctatccatcccgcaacctcatcaccctacctaaataccacactcatagattcataattacaaaacaaaagtctacaaaaagtcatctattgatgatgttgaacatcctgaaaagacgggtatttttttttcatttttgaagttttcaagcaccctccctatattttgtgcctgagatgatgatccactatctgccatgttgctatagcagatggataatttaactcagtagtaggaggttctataggttatcaccctatgaaactcatatcttttgtattaaaacctcaattctttattttcgaagggtgactaggagaaacttggcatactaccataaatcagagagaagttgaactatagcaatttaattggatacatattcattgacttcaaaccagttttttgtatattttcaaataactgttgctagttctgcttcctgttctaaaatgctgaaatggcaatcttttcctttgtattcctataagtaaatgcattggttattagattgatacattactcagttcctggtaaagaagtagttagaagccctgtttgcttttaagaatttactaatttgtcatccttttgattacaaggaattcaatttgcaacatgtgatgtcaatctttctaggcttcttttgagtgagttttgaactttagttaaataaaacaactttttttttttgagacagagtctcagtctattgccaaggctggagtgcagtggcacgatcttggctcactgcaacctccacctcccgggttcaggcaattctttgcctcagcctcccgaatagctgggattacaggcgcccgccaccatgcctggctaatttttgtatttttagtagagacggggtttcaccatcctggccaggctggtcttgaactcctgacctcatgatccacctgcctcggccccctaaagggctgggattacaggcatgagccactgcgcccagcataaataaaaaaaatttaaactattatataatttaggattttcaggaatgaaggttgattctttataaaccaaatttgattttgtgaggttttgcagaatttaattttacttggctaaatatgactcattatatggtcacagttttttcagtgattaatttggtaagaaatattttgttttccttcttggcattatcatgagttatggcttcctgtacacattcctgccattttagctgtgtactttttctttgaagctgccatatgttaacaacccaagagagatggtatttactggagagatcatcacttgttgctaatttgatttttcagattctctgagctcttataaaagagagagagcatgctgatgaatgttttcctgccctgactgctttgaggagctagtgtttgctgccctgggcccttagtcctgttatgttttggacttggggatggccactgtgtctaatccactttccattgaggcttttctgtaactggggagggctggatcactgtaggggtggacaaccctgagtgaatgcactgcaatttaatatttatggccggtacagaaaccatcaagaattgcttaaggatttactgacttggcatcatcaaaaatttatgaggcaggtatgctcatattccacaagcctgcatagtcatagaatgtcgttttatttttcttttgacattatgctttctggagtcttaataactcattaacaactgatgacacactttgctttttggtttaattataaccaaattttatttgccaaaatgatgtttaatttttggtgtattaacccattatgaatatctctcttttcctatgtttactatgactgctttacatttccagtctccccaaatctgatattttccttccccaagaaagaaccaaatacaattatattacgattgcatggtctgtctggtttggacagggtgactgaaatcttgggcttctttttaactctgaattggatccagcattctactttgcttcgtatgtaccaatcttgttgggtgagacatatacattggaatttggcaagtgtttgtatacccttcacccaactccactgttttcagagactgagtaacagtagtggctggatgccaacttcatgtctgccctgagaaggtcaccaaacacggacattcccccgtggtctggaatcctgcaaatctgtcagcctttggaagtgaagtgattctcccctaaagattatagagaaattctctgaagtcaaagctgatgaaatgtctggagttactctaggataaaattttaatttatttcaaaaaatacctttagcataaaataaaatttttgaaatgaatgaaaaatgtttatcatgcaacttctataacagagcccctggttgcatttttttgcattatcttctgtgcttgcagtacaggaaagctttttacacacttgtactgagaaagaggatgcaattttacatcctctgtctgtccttaaccttataggacaatagtgagagcatggcaccagttaatcctcgtaactgtagtttgagacaaatttatcattcccaatctaccaatgtgtgaaactgaggctcagtgaattaacagagtggctcaagtttctgtatatgggaagtaaagaactggaatgagactcatctgtctcacttcagagccatactcttcattatacacttctgtgtccctggttgcattataatattccaatttattattttttatgtacataacagtccaaggatcaatatactgtgacttacttaactacctccttattctgaggtgtttaatgattatttcatgaattttttctgaagataaagtgccaagattgggattaatgacccaaagaatgcagtcatttttatggcttcatacatactgcagattgatttgcaggttatagcaatttaattgatactaccaatccatcctttctaataataagcattattttttaaaagattattagtataataacagagtggtatttaattcatgccttgtttttgcatatctttgactaatacattcaacttgtttttttgtgcctttataagttttttttgagacagggtctcactctgtcacctaggctggagtgcagtggcattatctcggctcactgcaacctccacctcctgggctcaagcaatcctcccatctcagtcttccgagtagctggaagtacaggcatgtgccaccatggcctggcttggtagagacgggattatgccatgttgcctagagtggtctcgaactcctgggctcaagtgatccacctgccgtggcttccaaaagtgttgggattacagagtgagccaccatgcccggcctactttttttcattgtgtgtttcactcacgtccgtgtgaagagacaccaaacaggctttgtgtgagcaacgaggctgtttatttcacctgggtgcaggcaggctgagtctgaaaagagagtcagcgaagggagataggggtggggctgttttataagatttgggtaggtaaaggaaaattacagtcaaaggggggttgttctctggcgggcaggagtgggggggtcacaaggtgctcagtgggggagcttttgagccaggatgagccaggagaaggaatttcaccagataatgtcatctgttaaggcaggaacaggccattttcacttcttttgtggtggaatgtcatcagttaaggcaggaactggccatctggatgtgtacgtgcaggtcacaggggatatgatagtttagcttgggctcagaggcctgacattcctgtcttcttatattaataagaaaaataaaatgaaatggtggtaaagtgttgggatggtgaaaagttttggaggtggtatggagagataatgggcgatgtttctcagggctgcttcgagcgggattagggcggcatgggaacctagagtgggagatattaagctgaaggaagattttgtggtaaagggtgatattgtgcggttgttagaagaaacatttgtcatttagaattattggtgatggcctggatatggttttgtatgaattgaaaaactaaatggaataagagaaggagaaaaacaggtattaaaggtctaagaattgggaggacctaggacatctaattagagagtgcctaaggagattcagcatagtcctgccagcaaagattatttatttacttcaaaagttaagagcggcagtttggggatagcaccaggagatatcagctgtgatggcttggaaaaacagtgtaaaccggcagcgtaaacaagagcagggcatgtatgagtagttgagaatggtgaataggagtataactagacagaagatagtagggatgacaagttttttggggcacagtccaagttggtctggtgtctggaatgagactggggcctaataaaaaggagcgtccatacaggagctcaaatgggctgtaccctgtagcattccgaggacaggcctgaattctgagaagggaaagtggtaaaagtattgtccagtcctttttaagttggtggctgagcttggtgaggtgtgtttttaaaagaccattagtctgttctacctttcctgaagacggaggaccgtaagggatataaaggtttcactgaatactaagagcctgaaaaactgcttggctgatttgactaataaaggctcgtctgttatcagactgtattgaggtgggaaggctaaactgaggaattatgtctgacagaagggaagaaatgactgcagtggccttctcggaccctgtaggaaaggcctctacccatccagtgaaatggctacccaggctaagaggtattttaattttctgacttggggcatgtgagtaaagtcaatttgccagtcctgggcaggggcaaatccccgggcttgatgtgtagggaagggaggaggcctgaacaatccccaaggggtagtagaatagcagatggaacactgagaagtgatttcctggaggatagatttccaggatggaaaggaaatgagagattctaagagacagggtagcagcttgtaacctatgtggaagaggttatgaaatgacaacagaatagaatgggactgtgaggctgcaaggagatattttccttggtctaagaaccatttgccttgtgtgggaagagactgataggtggaagtttcagcaggggagtaggtgggaatgactgatgtgaaggagaaaaactggccgtgagggacagaagttggagagctagctgcttgtctagccaccttatcagcataagcgttgcctagagcaatgggatctgacgccttttgatggcctttgcagtgaatgactccagcttcctttggaagtaaagccgccttgagcagagtttttattagaggcattaatgatggaggacccttgcgtagtgaggaaacctctttcagcccatgtgaccacatggtggtgtatgatatggaaggcatatttagagtcagtataaatattgacgtgtcgtccttttgcaagagtgagggcttgagttaaggcaactagttcggctttctgagaggtagtgggggggggtgggcagagtggtagccttgatgatagatgtggaagctactatagcatagcctgcctttgctggtgagtggcgattaggcctggtggaactgccatcaataaaccaaatgtgatcagggtgaggaacaggaaagaaggaaatatggggaaatggggtgaatgttaggtggatcagagagatacagtcatgagggtcaggtgtggtatccagaataatgtgggaggctggattgaagtccatgccaggaacagtggtaattgtgggacactcaacaaagagtgagcacagctgaaggagccagggagcagaaagtatatgcctcaggtgtgaggaagaaaatagattttggaagttatgagaactgtagagagtgagttgagcatagtttgtgattttgagggcctctaaaagtattaaagcagcggcagccgctgcacgcagacatgagggctaggctaaaacagtaaggtcaagttgtttggacagaaaggctacagggtgcggtcctggctcttgtgtaagaattctgacctcactaaccatgcctaggaaggaaaggagttgttgttttgtaagggattgaggtttgggagattagtcagacatgatcagcagggagagcatgtgtgtttttatgagaattatgccgagataggtaacagatgaggatgaaatttggacttgactgaagtaatgggggctgtctgtgaagccctgtggcagtacagcccaggtaatttgctgagcctaatgggtgtcagggtcagtctaagtgaaagcgaagagaggctgggatgaagggtgcaaagggatagtaaagaaagcatgtttgagatccagaacagaataatgggctgtggagggaggtattgaggataggagagtatatgggtttggcaccacagggtggataggcaaaacaatttcattgataaggcgcagatcctgaactaacctgtaaggcttgtctggttctaggacaggtaaaatgggggaattataaggagagtttataggctttaaaaggccatgctgtaacaggtgagtgataacaggctttaatcattttaaagagtgctgtgggatgggatattggcattgagcaggctaagggtgattaggttttaatgagatggtaaggggtgcatgatcggtcaccaaggagggagtagaggtatcttatacttgtgggttaaggtggggggatacaagaggaggacgcaaaggaggctttggattgggaagaagggcggcaatgagattcagctgtagtccaggaatagtcagggaagcagataatttagttaaagtgtctcagcctaataagggaactggacaggtggggacaattaaaaaggagtgcttaaaagagtattgtcaaagttggcaccagagttggggagttttaagaggtttagaagcctggccgtcaatatctacaacagttatggaggcaagggaaacaggcccttgaaaagaaggtaatgtggagtgggtagcctccatattgattaagaaggggaaggacttaccctccactgtgagagttacccaaatctcggcatccatgatggtctagggggcttccaaggcgatttggcagtgtcagtcttcagctgctaagctgagaagatctgggaaggagtcagtcagagagccttgggccagagttccaggggctctgggagtggctgccaggtgagttgaacagtccgattttcagtggagtcccgcacagatgagacgcggcttaggaggaatcctgggctgcgggcattccttggcctggtggccagatttctggcacttgtagcaagctcctgggggaggcaggcctggaggaactcctggtcactgcggtttaggcatttggaagttcttgtgtgctggagatgtggctggggtttgtctcacagtggaggcaaggaattgcaactcagaaatatgttgctacttggctgcctctactctattattgtacaccttgaaggcacggttaatgaagtcctgttgtggggtttgagggctggaatttaatttttggagttttatttaatgtccagagcagattgggtaataaaatgtattttgagaataagacggccttttgaccttttagggtccagggctgtaaagtgtctcagggttgctgccaaacgagccatgaactgggctgggtttttatagttgctgaaaaagagcctaaacactatctgatttgggataaagaaaaaggagcattaaccttgactatgcctttagctccagccacctttttaagaggaaattgctgggcaggtgggggagggctagtcatggaacgaaactgtaagccagaccgggtgtaaggaggagaggtgataaaaggattatagggtggaggagtggaggccgaggaagaatttggacctagcttggcctggtgaggaggggagaggtcagatgggtctgtagaaaaggaagattagaaagacttagcgacgcttggggttgggactgaggggacaggcaggagggaaagaaggaagatttgggatgagttgtactgggaacagagactagggagggaccgatgtgtaaaagaatgtctggacgtcaggcatctcagaccgtttgcccattttatgacaagaattatttagatcttgtaggatggaaaaattgaacgtgccgttttctggctatttggaaccactgtcgagtttgcattggggtcaagcggcatcgcagaagaaaataaggcatttaggttttaggtcaggtgtaagttgaataggttttaggtttttaagaacacaggctaagggagaagaagggggcaatggggggcagaagcttgcccatagtgaaggaggcaagcccagagaaaagagagagtagagacacggagagaagggatggggggttcttgccccctagaaaagctgtacttgccactaacggtgaaggaccaaggcaggcgtccctgcatggtcagacacctctgaaacgtgggtgaataatcatgcagacatccccgtgtgattaaacaccaagcgaagactgtcttcccgagtccgtgaacagcgccagagttttgggtccacagataaaacgcgtctccttcatctctaccagaaaaggaaaggaactgaaattaagagaagggagagattgaagtgtggcgccaagattgaaaggaaaaagaggttgagggatagtgagagaggttggagaagagagtaaaaagaggccgcttaccagatttaaaattggtgagatgttcctttctgaggaccagaggtcataggtggatctttctcacagaacaaagagcaggaggacaggggattgatctcccaaggggggtcccccgatctgagtcacggcaccaaatttcactcgcgtccgtgtgaagagaccgctaaacaggctttgtgtgagcaacaaggctgtttatttcacctgggtgcaagcgggctgagtccgaaaagagagtcagcgaagggagataggggtggcgctgttttataagatttgggtagataaaggaaaattacagtcaaaggggggttgttctttggcgggcaggagtgggggtcacaaggtgctcagtaggggagcttttgagccaggatgagccaggagaaggaatttcaccagataatgtcatcagttaaggcaggaacaggccattttcacttcttttgtggtggaatgtcatcagttaaggcaggaactggccatctggatgtgtacttgcaggtcacaggggatatgatggcttagcttgggctcagaggcctgacagtgtgttgtctatgtcctttgtctattggttttattttgaaggaggcacctagtggttttcttctctttatataatatggttatcaatcattttttcctatttgtatgtgtgtgtgtatttgtgaaattaacccctcatcatgattaatagtggaccaagaacaaagtataaaaaataatatcatgttgagataacggcgtagaatggattttaaacttcttaaggcattagggtgcaaatgatgtactaaacaacatagaccgatctttctgagtaaaaacattctatttccactctgtgtattaatatgcattggacctggcctttcaaacaaatgtgatattcagggaactgccgcaattgagaccttaataaaccagtttcacttttttcagtaaatctgtgaaagctattattttacattttctccactgttaaaatacagaaactgagagaagtactcagtatcctacccaagaccttatttttcttcaggatgcatctcatgttttgtacttcactgtctttggctgtttttttctttattatttcccattttcttaagttgatccattataaaaacaactcctgcttacaggactatttttttccttccagaggcgtgctgttatttcataggtgaacggatagtgtcctgatggtgtctgtggcccttgaagctgcagtttaaggagggggttcaaagaaatggtagagaaaggtcgtccctgtcctggaaggatgccagataggatgacctttgaaactgtcatcaggggcatgaaaaatgggtttgcaatagttccctgcccttctctgcataaacgatatacagcatttgatattaaggcaaatatccttttccattgatgatgtgtaatcataaatcataagaaatttctatgatttcggattcaggaaggcacctttctacctgttgcagctgttgggagtcattctccctccagcccgactatgtcttcccactgcttttggctgctcccattggctttcacattctcctctccacctttggactatcccctacccttatctatccacacattcacttcctacattccttccatgcctaatcaggacagctcctctgaccaccttaacttcccaggatgtccgcgtgctctggataaagtgcgctaagccccgccccgcccctccccgtgtgatctgagtcgggccccactgactttcctgtacacacatcctctgtcctccttggacccatatttgtagtcagtctctctgttcccactctgcatggcacttgacctgatgctgggaaggtaatcattatccttcccttaatgtttcaggattattcattctattttgccacatctaatgtaatatttaatagcatctatgaagaagactgaagactataaataaatgctctctttagtattgagaaggttttatacaatataaaatttagagtacatttttttctcaggaggtctgacattaatattaatcgtgagccccaaagtagaagcttttatattttagcataatgaagtttaccatatgtttcaaagtcacttgcaattgtgcttctcataatgacaattagaaaggtcatcctgtcttgccaggctccattaggtatataaaccagctcgtggctgtcaccgtgaaatgtgttaaggcacttgtatgcaaattcaaggggagacatgatattttttatcccaaagtgtagctgtttacaactaattaccaaacacggaacaagcctattgtttgcctttacatgatatatgggcatagaagtttctaaagcaaattctcctctgtcttttcattgattaaattatatgaagtcaccctcttccatgaagcattacatgatgaggtccccaaagcactgaataaagaaatttgtcattaagacactggtgtatttctgatctatatattttttttctgcttcactcgaaaaacttattatctgcatgaaagtatggaaactgttattgtatttaactctctacatgtgaaccttgaagaaatgatggggcgaaggtgaaatgaaagggaggaggtgaggaggtggcacaagtaatgttttcttatggaacttgtagagggataaacctacattagaatcaaagcaggtaattcctgggaaactgaagcatgccattgtggatgtgggtcatgggaactgatgctggaaaaaaatagttcctaatctggtttgggaatggcaaatttcgttgccacaattgaaatattaatatacttctttgtatgaatgccctttcatttatgccttttttttctttaagaggcattttttctctaagacaggctaaacttctgtattcaagcctttagagtttgcaaacatttatcaatagataagaaagatagataaaaagtcctggattcattaatgcacagccatggtctctacagttttgaaatttctcacttgggagaatactggagaagaacatgtggcccgtgaagcatttgactgttaatatttcgtactattcagatgctttaatttaaaaaattaatctatgaatttaacatatattcatgggatgcagacactgcagagagctgcctcttcctggactttgtgtttgaactgtgttccggttgcttaagcacccatctatctggaatggtttgtgttcaggttttccagaggaaaggatgactccatgttcctcaaggaactttccaggcaaatgaatttgttattttttaatattaaaaatgatcctctttattgagagtgatagactaagggaggaataaacagttgtaatagccctgtgacacataagcggagaaaaaaaccccctccatgcttatgtaaataggaaggagaacaactgtagcaagaatatagaaaaggactcctttcttctctcttccactctcgttttttgccctttggcctaaagctgttaacattgggtgaatgtccctgtcgtcatcttgcattatatctcacgttctgtttgttattgatagggatggatatctgagagtctatatcaagagttacatgtaagtttgtgtaaggcccttcttttgcttctacatttttgctcgttgtatggatgcattttgtaggactgtgagcttatatttaaaacacctgtgcggcagtggacccttgtcaccgcctggcctctcattcagaagccttagctgttcctcaactcctacaacacatgttgagcgcctctcaggtgccagctactgtaataggcactggggagtggaagggtgacaagatgtgattcctgacctcgagagctttgcagtcactggtggaggaggcacatgtacacagcaaatagggcacgatgtgttgaaggatgaaatgaagcaataaacaataggtatcaagacagcagagataaggacaaccaaggatgccttcgaggagccagggagagcctcacagaggaggcagggcatgcaccgtggcttggggatggaaggggcagaaatagtgttgttttagggaagaggagagcacagactcagaggtcggaggaacgtggcacatctaggagacagggatccaatcccagccctaccacttagcagctgtgtaactttgggaaagtttgctaatcactctgagtatgtttcctcccacgtaaagtagaaatactactactactaatattgacctcttaggaccatgagtagataaagtaataatacatgtaacaatcttggcttagtgccctagcgtatcataaggactcaataaatattagtttatgtgattattgatctggctggactgaagggtgtaagagtgagaatgataggagatgaggctggagaagtggacagagccaaaccatgagataccttttcaccaggctggggttttcaagatttctgaaaggtcgtggctagccattaaaataacttggtttctgtatcctccactgctcctgaacattcttgtattacagttgtgttagtctgtttgcattgctatcaaggaatacctgagacagggtaatttgtaaagaaaataagtttatttggcttatagttctgcaggctgtacatgaaatatagtgctgccatctgcttctggcaaggcctcaggaagcttacaatcatggtggaaagggcaggggagccagccagcgtgtcacatggcgagagagggagcaagaggcgaggtggaggtgccaggctctttttaaacaaccggatcttgtgtgaactcattaccacagaaagggcaccaagccatgcataagggactcgcccccatgacaccagcacctcccacaaggccccacctccaacattgaggaatcacatttcaacatgagatttggagggggcaaacatctaaactatatcaaaagtcgatgattaaacacagtctcatataaatgttctacctcaaaaaaacccaaacattgcacacctattatagctaagataaaaaatactgacaacaccaagtgctgccaagaaggtggagcaggccaattgctcatacatctctggtgggatgtgtcagtatcgcaggtggggttgtaagagtagagccatctggaagacagtgccagtggcttatggagttaaacattacacttgccatgtgacctggcaattccactcctgggtacttatttatcctctagaaataaaaatttatatcccacaaaactgtaatgaatatttatagcagctttattcataattgcctaaaactgaaaacaagtcaaatgtccttcactgagtggatagaataacaaactatggtaccttcacatagtggaacacgactcagtaataaggaacaaactatcaatatacacaacaacctggctgcatctcaaatgcattgtactgagtgaaagaaaccggtctcaaaaggctacagctgtagcatcctattcatacgatgctctggaaaagagacctctaagggcagggtttaggaattgggagaggggctggggaagggtctgattagaaattaacagcccaagggaattcttggttttgtttttatttgtttttttttttttgttgttgttgttttttgagacggagtctcgctctgtcacccaggctggagtgcagtggcgcgatctcagctcactgcaagctccgcctcagcccaagggaattctttaggggccttgggattgttctgtatcctgtttgtggtgatggttacaagttacagcccatagaactgtacaacaagtgaattttactgcgtgtaaatttttaaaaaattttaaaaacttgaagacatatagctcatttaccacgtgctttacctgtcttatctcattaatcctctctatgaggttgatgttattattacaggtcgaacattcctaatctgaaaatccaaaatctggaatgctccaaaatctgaaactaattttgaggcctgacatgatgctcaaaggaaaagctcatagaagcatttcggattttgcattttcaaattagagattctccacaggtaattatgcagatcttccaaaagctgaaaaaaatctgaaatccacaacacttttggtcctaagcatttcagataagggatactcaacctggatctctattagtgcattattatctactactattattattattgactaagcagaggctttgtgaggtttggcccaaacctacataccttccagggggcaaagcctggcacaagccaggtgtgcacactccccagaccctgaatttccacagcattgcgagtcacccctcaaggagtcacagagtgggtggtagatctttctcaggctcttgtacaggctgtacctcagtttatccagctcattggtcagtgtggttgctctgtgcatcatgctggtgcaacttttacaaatgtgcaaatgttctaaatgcttagtatcagagagggagttgcctactgaatattttctgacctcttaacttgtactgttggctaagttaaatttggcttcttttcaaggaactattaccttcctagagggtttgtgtggtgacacccataaaaatcttattcagtttttgttcaattcacagctttaacttagtctccttaaaaatcactcaggttgtaaccaaaggctgctctatggctgagtagaattgttaattattaataactgttaatcaactacatagtcaacctcagacaagagggcaagagataattccttagacacacacacaaaaagagcaaaatgttaaggttagaaaacagtaaaaacgatgaagatatttaattctttttgcatactttgtaattatttgtttaaatatctatttccctagcctctgtgccagtttttctcgttgttttttatttttatttttttaagagagggtcttgtgttgttgcccaggctggagtccagtggtgcaaccatgactcactgcatcctcacactactgggctttgatcctcccatgtcaggctcccaagcatctgggactacaggcatgcaccaccatgcctggctaatttttaaaacatttatttttgtagagataggatctctctctgttgcccaggctggccttgaacttctggtctcaagcaatcctctcaccagtcctctcacctcagtctcccaaagtgctgggattacgtgagccattgcgcccagccttttcgaggctattagttttctgcccccagttcctgtaatccttgcatagaataggggcttagtaaaggtttgctgagttagaactccatttcaatggatattgaacttgagaactgagtgagacttgtggagtatggtatttcaaagtattatttatccaacagtctgatatttcagaatcattcatttgccaactcctatgtaggtactttggagatattatttgagttattccttatgacatcccatgcagcaaacatattccttcctaaatgaggaagctgaggctaggagtgatgagctgatttgcttgttatgcacactggatggagtgtgagctgtgtcagacacgtgaattcagatcctcttgtgccacatcagagggacatgagatggggtggctgtttcacttctgtgagcctcactttccccctcattcatttatgtaaccaatggtgggtccaggttttgtgaggactggagcttacataatttgagtatgggtcttatttaaagaaaaaaatatataggattatgattcaaatttggatacagggtttgaaggagacttgtgacagcgggagaccctgaggcttatgtgccattagattcatggtaaatctgtccttgctttcaactaatttttatagtgagccactacgtgccgggctgtgtctgcagctggttacatgtgctgagcctaacagtaccatcctggtcctctagaatgctagagcccactgggagacaccaccagaaaacagacaacggcagtacagtcagataagtgtatgatgggggggtatgaaaagccaggaaagatttctggaagagatgacatctaagctgctactcaggatatgtaaaagttaaaatggagaaaagtatggaaagcccatttgaggcagaagaaagaacaagcatgagaggtgatagagaaaagcttccttatggggaccgcaagaagtttagtggggctgcgttgttcagtggggtggaggagtggggagagcttcagctccagaattaggcaggggccaggtgggcttgtgtaccacttaaggagcttggaaatggtcctaagagcaataggaggcacttggacagatttaagcagggagtgatctgataagatttgcattggggggatgaaaaaaaggccacactgggtccagctgcagaatggagagagaatccactccacactgggcacgagggccatccccctgcagggaggccagtggcaggagagaggaaggtgacaggagagcagctgtgagaacgaagaggaggggatacgttacaaagttgttcagcagtgagaaccaacaggacttgagagtggatgcttagaggcaggaggtgcaggtggtcatgagggaggagataagatagaagcttagctttctggcctggaccaccggtggggggtattcattagaatcaaggccataagaacagcagatttggaagagattgtatgtctcctttgagccagttgagtttgcagtttctgagtgacatccaggtggagatgttcagtggagagctggttgcaaagctgaggaaggagagctgactgacggcagggctttggctgttctcagcatatggattataattagagccgtgcagatagatgagagtgcatgggaaaagccagtgcagagacaagatggtgcaaaggagtatcctaaagaacattaatctttaggggacaggcagaggacaaggagccacaaagaagcatgagagactgtggtcagggatgagggaggaccggcaggagtgtgtgaggagcacggattgtttttgtttgtggggttcccctgcctttagggacacactaactctttggatatcaactggttgtcccggaattccatttagctctgtttgacttgtgtgcagagcccatggttttcacagcccctcttcctttcagatttgataatttgctagagtggctcacagaactcaggaaaacactttacttatgtgtacaggtttattgtagaggatacaactcaggaacagccacatggaagagatgcataggacaaggtatgggggtggcgcagagcttccatgccccctccaggtgcgccacctcccagcactgccatggcctcaccagtccagaagctctctgaaccctgtggtttagggttttcatggagcttggttttatacattttagggagacatgagacatcaatcaaatacatttaagaaatacattggtttggtccagaaaggcaggacaacttgaagcaagttgggcgggcagggaggcttccaggttataggaaggtttaaaaattttctgattggcaattggtcaaaagagttattatcaatacccagcattttgggaggccgacgggggtggatcacgaggtcaggagatcaagaccatcctggctaacacgtgaaaccccgtctctactaaaaatacaaaaaaaattagccggacattgtggtgggcgcctgtagtcccagctactcgggaggctgaggcaggagaatggcatgaacctgggaggcggagcttgcagtgagctgaaactgtgccattgcactccagcctgggcgacagagcaagactctgactcaaaaaaaaaaaaaaaagaaaaaaaagaaaaagaagagttattatcaataagaaggaatgtctgggtttcgataaggggttgtgcagaccaaagttttctcatgcagctgaagcctccaggtggcaggcttcagagagactagattgtaaatatttattatcagatgtaaggtctgtgttgatgttaataccggaggttatattgaggcatgttcaaccctacttcccgtcatagcctgagccagtctttctggttaaattttagagttctctggcctggcaggaagtccatttacatggttgaggaacttagaattttgtttttggtttacaaagagaaagcagagaagggtgatgaatgactgagccacatcctggtgccagctctggaccgggtttggctgtggtctccacaaacatttttgaatgaatacatgagtgagcaagtgagtgagtgaatgggaggaaggccggcggggggaggtttgaggagagtggggaaaggtctgctgtggtgccttgaaggtggggagacctggcacggggaacacagaattgccaggtggatttggtgcccatttggaaggtggcccagtgacttctggggacagtgtccctgagatcatgcattttccccagctgtgctcagcagcctgcttcagggagagggaatggcaacagcgagcacgccaggctgggggtttccaggcaggtagaggagaaaggcaactgggttcgggagccgaacggagtggcaggaaggtgagtgaagtgatggatggctatgtctacactggaggctggtaaaggagggaaagtgataggttgaggggtgggtggctggatgtggtcgtggaacaggggcagaaataactagggtgtgggaaaagtagtggcaaggtggctgggagcttggtggctcagtttgggtgcagatgaagccaaggtgaagtgaggtgggatggtgagaccaaggacccagaagcccaggtgtcggcctggtgatgcaaggatggcggcagggctcggggtggggaggaggtggaggtccaggatcaaggcccccagagaagggggatgtcccagatgagagcaatgagaaggacagcttggggtgaagctgaatgccctgagccttcaagcagcaacagattatacctgaaggtagagccacgttagggacgtgggaggacactgactgcttgggtaggggtggggagtgagcatccacactcgagtggctgcagatgccatgagaccctccagggatgaccaggtcactgttagggcagagaggaggaggcagctttcagaaggagctgggcatgcagagcttgctaaccagtgatggaggatccaggcagtagggcaaagcccatggaggggcccacaggacgggacaactgcgaagacactgtctgccttggaatgcgggcagcatcttcatagccatccagggatttggaccctggccttcctaagtgagagctatactttttctataatttctgccactacataactgccaaagttaaaggtggaaaaagagtctctgtcctagcttttcagcgaccttttcaaaaggaacagaaaatcgtcgcattctcttgcttctacaatgccagtgattgtctgatgcatcctgggtttgacaaaggcaggtagacactcacggtgcagggacacgccagttccaaatcgcatctttactttttaaatgttgaaaaacaaaaaagacagtgcatcttagaatttaaggcaacatagtaactaaagtggcggaggcttttaactgaaaccagaagaaacagcatgagttttgttgttttatgtttcttagctgaaagaaactcaggcaggataacgtgataaggaaactcaggtatttgcctgtgattagttcaggaactgttgaaaaaagactctgggattgggcagaactagagtttagatcactagcttgaaggacttttaagtccagtttaagatttggagagagttataaaggctaagccagcatttataagaacatgtaccaattagagaagtacaggagaatttgctgttttctctgttattataaagatcattgttcttaaatttacattagtttgctaggcctactgccacagaaaaccacagactgagtggcttggacaacagatgtttattttctcccaactctgaaggctggaagttcgagatcaaggtgtcagcacaaatggtctctccctaagcctctctgcttggcttgcggatggctgtcttctccctgcgtcctccctcacatggccttccctttgtgtgtgtctgtgtcctcatctcctctcctcatagggatgccgatcagactggtttagggctcaacctcttgacctcgtttcaatgttatcacctctctaaagaccgtgtctccaaaaagtcacattctgaagtaccagggattagggattcaacatataagttttgggggaggacacagttcagtccatagcagcctattccatacctcattttataagaagagaatttaaaatcagatccttgcctagcactcttctggtcacacacagaaaataatccagaaagttaccttggctgctcagcctcatgtggctggaccctctgttgctgtaagacctcaccggacccttctccgtcctcgctccttcacatgctggaaccttccttacatgtctagatgcaccgagcttgttcacaccttcagggtttgttccctcatcctaaaatggtttctccttagttttatatggctctacccttgtgccgttttggcctcaagttaaatcctgttcctccaagaagcctccctgaccatccaatggaaagcagccacccagcaatgccagatctcattaccctgtctcagtgctcagtgtggtacttattgctggctgatagggcctcatttatcttgtcaccaatgtccccagcactgaagcaatccccagcagatagtgtcactcaaatatttgccaagtgaatgaataaaaccagaagagttaggaagaaatgaagagagctgctgggaagaatctggatgttcctgaagtccaagactttatttttttaggtgggattcatcaaaaggaggcagtttgcctgaggtcccttccctgggcaaagagagaaacagggctggtctgactccaggcctgtctgtgactttgattgttttaacaagcagatggtatttttgtacacagtgacttggagaacttggagacgcgtatcaatgccgcctttcttccctgtcccttgcataacaggtttggtgtcttggatcaagtttggggcagcatcaaactgcgccactagactgcatcccatgatgcagggattatactgtattcataccctgcagtgtttgcacatagaagccttactataaatgtttgctgagtgaaaaacagtgaataaatgagcgaatatttaaatgacaagaactgacagtcttttgaagttcctctagggtggtgcttctcaaacttcaacatccatctgaaccatctggaaagctagttaaaatgccaggtgtgattcaggaggtcctgggtagcctgagaatctgcatttctaatgagtttccaggtgatggtattgctgctgttctcacctctcctttgtgtagcaaggctctaggatgtgtccaggatggtctatctacttggtcaaagataatcttgtgagttgactagtcatcaaaagaccccgatcacttctcagtttgtccaaaaaataacacatgcaactttcagccagttacttaacctcagtgatcttcagtttttgtgcataggtgaattggagatgggtgttaatgccccctttcttccctgtcccttgcatattatgcctgatgtcttggatcaagttttgggcagtatcaaactatgccattagatcatatcccatgatgcagggattacattatattcatactctgcagtgtcttgcacatagaggccttactgtaaatgtttgcagtgaaacaacgaataaatgagtgaatatttaaaagacaagaactgacagtcttttgaagttcactttggaggaacctagtccaattatcaggagatattatttgttgaacactttgtacctgctgagcttcttgatatgtgttacgtttacttatcacaacaatcctgcaaggtggaattattatcctcatttttttttttttttgagacagaattttgctcttgttgcctaggctggagtgcaatggcctgatctcggctcactgcaacctctgcctcccaggttcaagtgattctcctgccttggactcccgagtagctgggatcatagggatgcgccaccacgctcggctaattgtgtatttttagtagagacggggtttctccctgttggtcaggctggtcttgaactccctacctcaggtgatccatccacctcggcctcccaaagtgctgggattacaggcgtgagccaccgtgcctggcctatcctcattttacagaagaggaaactagtgctcagagaggttagacaacatgcccaaggtccccaagtcaataaccaggagccaatagcagggctctgatgatgatgatggtggtgtgtgtgtgtggtgtagtgtatgtttgtgttttcatgtgtatatgtgtgtgtatgtgtgcgtgtgtttccctcataccattttgcttatcaaatgatcctttaggttctttccaagtgtatgattttaggtcaaagacaaagcatgacacagttcactgtgaattgtgagttattatacaagctcgtgaaagagtcggataccttttctgatcctcaatataacctttgtcttctcaccaccataacacgttggtttctcttcaggaactgattttatattctcatgagcacatatgcagtttctcctatagactgtaagatttttaagagcaaggactgggtcttatttttcattttgttccctagtgtcttcgatccttattgcattcagtggtttgatttgaacagaactttggaagcatgagacagactctgtacattaaaatgcttccatagcactcaccatggtgtccaaagtgtcactaaatctctgcttgcttgagatttctctatcttaattaatcttgatttgtgctgtttttttgtgaaagagtaaatgcctgtgggagggctgggccccacctacggagaactctggtagtgtgccaagagcaggactgcataattggtgcatgtgacaaggaacagaggagggtggaggggtccctggatgatgggggtgccttccccttggctgtctttattgtgtccccattggcattactgttactgatcactaaatcagggaacagacggaggcgtgaggtaggatcctacgacagacagcctttagtgagttaccaatgacgccagagttgaccatcaagtaaatctgttgccttttgaaagacatgtctgtctgtacaatgctagggcctgagttgcttaaccttctagtaaaccatgaatttctctcacatgtccttggggtgatgaaaatcttcccgagttgtgcggagcacaaagtagaacctgacagggaatgttctgaaataattgtgtggatggtgacaggtaaaaaaatacactgtagagatatcgatcctgtacgaatgcaacctaagttgttgctctgttaagaaatgtttttggagttctctatacactaaaaaaagaagaaaaagaaaaagaagaaaagtggaaaagaagagatttctcttgtcttgtatgaagcagcaaaataatattctatcagaattgttttaaatatggtaaagtggggcacttctatttaaagggtacgtctttggttcattttttatttttaattgccctgatatctcttgcttttgggaaagtccgacgctctggctctctgctatctgttcaaccagccttcagtagaagtgggaacacaaatggctcattgttttaattttggatttccttaggctgttgctgtcacctagtcatctcagacactcttacagggaaaccagcactggcagggtgtgaaggtcatagcaagggcagcagtgcttcccaggatcatgtgcctggagaggtcggtatgccctgacttctaaagggggcctgccttccacaggacgagcacttactgagcgcttctcctgcacttactgtacattctcatccatatgttagttgttgttaccataaatgtcctcacacatctgtggcatgtggatgacaagagcttctgagtatattttttaactgtgtttttcgaaggcaactttaagtgctaacaatccagtggttatatgggtggctattgactttcagattcacggcactgttctgagtgggtaattcgccgcctttctctaactcttatgtccttgaggaacctgaatgtacagatgattacctgtacctactgagcatcctctcgcagagttggggcgataaatattctgcaaaacctgctataaaacagtcagccctgagcagcaggaaactgaatatagtcactcacatagctaaacccaggctcaggcctacattcacccctgtccgaagggggtggaaatgagatcatttcacacctcacgtggaagtgcagacctgaaagaagacttggggctcccccagcacaggtgtccccattttacaggtgccaaaggctgtggcggagacagagatggggagaggagttggccgtgatgcgtcgtcatggagcatctcacatgtaagggccatgagaagtgaggacagaagggcagccaggctggctggtcttcatgtgggccagttgagtgggaatgcggcactcatgggccggcggaagaatgagcatttgaggaggcagagttccccactcttctgaacctctgttttacaaaaggcttagaatataaaattgggaccttgtctttggaaaggagggagcaaagtgttaacctggacagctttggtgcacaaggtgagaggtttaccaagggctcacacactctccttcatgggagagggtgcttaggaggaggtctggctgctgtgaggtatgggacctgtccaggaccttctactgctacagcaggaacagcactgtgagggagggatgttgctcttcctatttttcagtcgtggaatggaggctttgaaaggtttggtaacttgctcgagatcacacagccagcgaggggtagcatgggattaaacaccagtcggctcgtctccaaaggcctgactgacaaaaacaaatttcaatcgattttacttttcctctgtaatagatgaggaatatctcatttcagaatatctgaaggtgacatttggagtcgctcattgattcaattattctgaatctttatttcagagcttatttatctcaggttttagatgtggaatgctccaaaactattcattggtttcacttccctttgcattgctaagtaaaggtgatataggagaactactcacaggggtgagcacagcaagggtacgaaggatgtaaaatcagacgcagcttttctatgcatctttcttaaacacattactcttaacccaagagacagtcaggatcattaactttcctaatattttgtaaagcattcatatagcaacatttggggcacatgcgcacctggtcttaagtcagggcaggagtggctaattaattctctgattcctcaggcttcacagtttcaaccagccataattattttgcaattgaggttccctctctgcctaaactggcattgttatcaagggctaaatgcatcagctttgtaataatgaagatgggtgccaattccatcttccatatgggatgaagttggggagagagatggtggagaagcactggtcagactgtaaatgatattgagtagaaagaagtcagggatttttgtttttaacatgaaaaagaaatagaattgtaactaagttgaagtttctttactgtttcatcttgtttctttacaaatttcatcttgtcatttacaagggtttatgccacatagctatggatttgggcccaatatttgaccttatagcagctctaaaatattagactgcagttaggaaatgccctctggatctgatttttaaacagaaccaaatgcattctactcttttctgcttttaagagtaacactgcttgaggatgcattgaagccctgctagacatctttgctgatatttgcctttagcattctttctggaggtatttagaccttaataaactaccattatcctttaaaaaaggactgaagagaataatatttgtagaaacaaaataatcaaatacagtcctacatcatttaatgttggggatacgttatgagaaatgcatcgttaggcaattttgccattgtgtgaacgtcatagagtgtacttacacaaacctagatggtgcaccctactactccacacccaggctacgtggtgcagcctattgctcctaggctacaaagctgtgcagatgtgactgtcctgaatactgtaggcaattgtcacactgtaagtatttgtgtatctgaacatatctaaacagaaaaggtacagtaaaaatgtggcattataatcttaggggaccaccatcacatacatggtctattgctgattaaaatgtggttaagtggtacatgactgtactagcattaaagttcttccgaactgagagggtggaatgggaacaggtactggcttcttgttttaagggctgactggtgaggaaggtactggcttcttgttttaagggctgactggtgaggaacttgccacacagagcagtaggctcaactaggctgaagacaggctacagataggctccagggttgacccagggccaagatacagcagctgccttgtcctggctcgctgcagacttggcatctccagtgcctgtatccctgaatttgtggttgaacttaagtttggggagtcccagtggccctaatgagactggaaataccaccctaaacaacctcctttagcagctaaactgacaataataatctgttgtttactgcacaggattgagatgagtgtagcaatctcctagacgaagggccaagctgctcacccacctgggtggggtggtcagtctagggcggcccaaggggattcttgggtcacgatgaccctggggctgataaccaactcacaaatacataaatcaacaacatgaggctagcttctgctggggctttgttgtctggtgggcctgagttttaatcccggctgacctcttactaagcgattgtgggtaagtcattctaatttttttctctctgagcctcaaattcctcatctataaagtgagcatgaaatcctattctagtcattctgagggacaactgaagtgatatatgtgataatatgaaatatgatagatgtgatatatagaactgtaaaacttttaaaaagtaaaatgcctgttaaattgttaaatatgtgtaatatgtgaaaaactcctggcaaatatacctactaatatccatttccatatagttcttttatataaaaggtagagcagtatatgtaaaccttctaataaaacacttagctataactatgaattctcatgtgctcttcctgctgtcagcctctcctcctgctgttaaatctttgcaaggcctcctctagttgttatgttctgaaaagattcaagtttgtatcctagacttcaaagttatgtctctcctatgtggtgtgtagtgtatcaccctgtacttggaggtatgtgatacaagaaactaaggaactaaaataattctttttttttttttttttgagatggagtctcactctgtcgcccagtctggagtgcagtggtacgatcttgctcactgcaacctctgcctcccgagttcaagcaattctcctgcctcagcctccggagtagctgggattacaggtgcccgccaccatgcctggctaattttgtattcttagtagagatggggttttaccatgttgaccagactggtctaaaactcctgacctcaagtgatccaccttcctcagcctcccaaagtgctgggattacagacatgagccactgtgcctggcccctacaataattctttaatgtgaggaaatatcaaatgaaaaataagaaattctaggtaaggaaagaaatttatttagtggaagtataaaagaagtttaaaaagttgaagaaaattttggttttcaatgttgatgcagcgtcctttgtgaatctttaaatttgtgaatgacacttttgaaaacttacaccttattctaagtgtctttgttcactttacactgtactgtaaagaatcacaagagtgtctcataaataactttctatataacatatgtatatttcaaaataacatgttatatatataatacatacaatttttgtcaattaaacagtacattaaaaagacaaaaataactttccataaatgagctcaagttatttcatccacagtgatagaatgttccccatttgatgcaagcagttaaacttaatttccattaagacaaacacacaaataacaatcctccttcccaaacttgaaatcccacttctctttttgaactctcttcatgaagtagtcccttttcttgcatttacaacataaagcctaaaccacaaatattggagggcaggggttgaggatgagcaattgagatgttcctcatgcccttaaaccaagagtccttatgttctctccttcctaaggatggcttattttcctttccatgaaatgactttaagggtgattatatccaaagggaagtgacgtttccccttctttctcttcagttggtccattttcacagcccacaaaagcaagtctctattttgggacttgattcaaagtctgaaaaaaccctaggcacatctttcttccttgaatatgttcacgtgcatattccaaaaaaggttctcattgctagttaggccattaattttatgtgatatccaaatcaaacagctgctgtactgtttaagctcagatcctaaaatggcactttgaacatgaaagtcgtggctgccactctctgggtgactatctggcgatgacacttctacctttgtttttggcttgacgtgcatatgccgaaggcttcagcaaacataaactcatacaaatgtttgtcaagctgtgtgagcctaaacagctcattagttgcaagaatgatcagatgggagatgggttgcccaatttggatggtgacctttatgagctctcggttggattgcagatttatgtgtcacagtatattggaacataatgaatcctgtggcatgtggatggtaaaatgcagggcagaaactgtgcaatgaagaggcaggaagaaggtggcaggtccaggagcataagagcagttaatcatctcctttcccccttcccctattctgcttcccctctgttctcggggtgcccattaaaatgcagttggtaatgaaatgctgtttgaaatcaaagttgctgaaacgatattgtggatattgtggaaatctgtcatatttattttaaggatgagcttacttccaggtgctttcagtgactgcagccccgttagttcccatgcattgattctctctcatgtccctgctccagggtaattctcttgtgctcaggcacatgaccttctagttgaaaacctgcccctgccatttctttatgtggctgcggcccagggagcttgcctgccctgcgtgagcaggttgcaatgataatggttcccagtgctgctcagtggggaactgaagtcatggtattttccttcatatcctcttgaagcttcattttgtgaccttgtttcatcctgctgaacctatcattggaattaccccaaaggtggtggcaggggagtccccagaaaggagtgccccaaactttcccaagatggggcctactgagattccaaagaaagaagcagtaaaagccggagtgatcaggccaaagcattcattaggggaacttaggcagagtgggctgcagcaatcctgcggcggcagcatgaaaaaaggggtcttccacctagaaacatccacagcgaggtgctcaggggatggagtttacatgagggtttaaggaatttggctcagggccagggccagtttctttcagtgttttgggcaaaagcttagatacctttatcaatgtgtgggaatgttcaaggccctggtttgggttcaagcctgctgggaaaaacctgcagctgtctgggtcacagagcggtcaaggcactctgtgagttttggtcacaacagaaaggcaagggctctaggggaccctccagaactacaggctccaatgtcagccccactttcccaagtacaaatttatttcagaaattaaagtactactcttactttttcacacatttcgaagtcatgtgttgacatggatagcctgtctagcacaggaaaactctgatctatttaactgatttaaaatgtttataattgattatctggataagtgtcattgatggcactccaggtgtgtgaagacgccactggcctgggaatcacgacatgtggggtttgtcccagatccctgccatgccatttaaacaccatgggcctcagtttcctcacagcaaaaattagggttatactagatattctccatggaccttgtcaagtattttttgtgatgctgggattttataactaacacaggcaaacaataacctagaatgattagaatcttgaaaaaattgtttgtttgtttgttacagagaatcttgaagttagctgaagtctgtttgactttcttccggaatcagcacagtccaaatgcagccatgacttctcactgtcagaactagacgggccacactgagaaagaatgtggaccggctacccggaatctggccgcttagtgcattcaagaatgctgcttggtttctatggctgtgatttccaagcattttctaaaaggtttatagaggagaaacctaagtgcctgccaccaccccaccttgaagtcaaatttccctgaaggcactggagcatagggagaaaaacatcagctaactcttgccgctataggcccgggttaaattgcagctgggaaattcattccagtggcttgccgggctaaacacaattgtggatggagcctggagaagcatccaagcaaacaaccacttgtgtcagttcagttgtttcaccaaaaaagcaaaataaaacagattttactaactcaattaataattcagttgccccataaaatatagcctcactgaatttcttgtcttgtcttccaagacattaagtcagggcttatttatagccatggctctcttccctggctaagcatccgggccacctgccccagcaggtgagcccttggtccaaggtggtcctggactcagcatgtttttcagagttctccaggtaattccaatggttagtcaatttatcattcatttggggctgattatcagtcttccatgtggataaaaccagttaatttcctgtggatcttttttgaaagccttattaagaggagggagccctgttttgaacttgtgtcatgagctctgcctgtctctggaggtggcaagggtgctcgtcttcattctggtctgtgtcgcatgctgtcttcctctgtctccctactctttctcaaccttcttatttactattccacacactcgctgggttagacaaccttttctgttgttctgctgaaggttacaatttggagtcgattcctgtagtcttcctttttctattcactttcaaaaaagatgttgcaaagtccaagtttcttcctcatgttccgtttctctggggagtgctgtagaagtttccataccttcctgcttctggccttcttagtattttaataactcctgccttgttcccaggtttctccaagtatctggggaaagtagaaacctcagagatggggtctggaaatgtaaaacgttgatgaatttcagggtcacccttgtgaaagctattgattggtcagaggtattctggaaaagtctgcaaaatccagaagctaatttctattttaaaatacaccctataactcttgagtgcccactcatcctcagctggctctggggaatggtgtctgagctcacggtctcatctgtgggagctgcatctcatcaacctattttggaaaccagcatacttctggttctgagaattcagcttaaaaacaatacctagtttcctgtataatccccccaccaaaaaaaagtttgcaatgtgccccatgtctatctgacacattttcacttgtttcttcattgatgatctaggtctgtccaccctgctctatttcttttctatttatctccattatcttagtctatttgggctgctgtaacaaagtaccatagactgagtggctcataaataacagaaatgtatctctcacagttctggaggctgggaagtccagaatcgaggcagtggtagattcggtgtctggtgagggcctgtttccaggttcatagatggtgccttttcaatatgtcctcccattctggaaggggcgagggagctctctggggcctcttttgtaaggggactaattccattcacggagattctaacctcatgacctaatcacctcccaaaacccctacatcttaataccatcactttggggttaggattttaacaaatgaattttgggagggcacaaacatcagtctgtaacatccatttgatgcctacttcaaaattttttgttgctattacatcaaaatctcttctggctttttctgaaagtggatttctatgtaaccactttttcttttcttttgcattatgactgagtttttcttcttaagaaaacaagaagcacgggtagatgatggagagcatgagtgccagagagtaaggaagcctgggctcttctgccagattttgtgttagtcgaaaactgaggacttggagggttgatgagctgagcttttcgttggggctcctctttcccatccatgtattgttccagcagtacaaagtttgtcaatcagagagaatgtgggttcccatggcaaggtggcttccagttttcatactctgtaaaaggcttagtgatggaaggagattaaatgtaatgctttaatgtggatttaggtagagatcttgtaccacagaaaattggaaatcaagggtgaaaaactgagaaatggagtgatgtctttttcttccatacaatttcatatttgcaaagtaaattaactctaaatagtttagggttttattccagaaatctataaaactttaaagaatcttggcatctgattgatttttctagtttatgaaaaactgacaatattctaagccaaagacacattcaacataataatgcaggttgagtatcccttatctaaaatgcttgggacaagaactgttttagatctaggatttttttttgaatatttgcttatttacctgttgagcatctctaatcccaaaatccaaaatccaaaatccaaaatgctcctgtcagcatttcctttgagcatcatgttggtgctcagaaaatagtgaattttgaagtatttcaaatttcagatttttggattagaaacctacatatcaaaaaatattttgtgtaatgtcttacgatgtgtgtgtttggagccttctcagggttaagcagatatgaaaagcccacgttttcaggaaagaatttaagaaaataaagggccaacattttttccctcctggctccatgtcataatatttttgccggctgcagagtctattcttttctatcttcagacttatcactatcaagcattttccattccccacaattctcattttttgttatctttttgcacttgcaaaaactgaaatttggcttgaatgagacacatttccctaccctttatctctcactgattcattccttgaattgggacaaatctttctaatctaagccagtttcatcctcttgcaatacagtaacctgtgtcagcagagtcctgtgtgggatgagtttggcagaattgcagactgcatttttggacctagcagttgaagatgattctgtccctcatcaatttttttccgcaagggcacttttgccttcaaatggtattgtgtttttctatttcctttatctaaagaaagtcttcaacttagttttgttctgttcctgtgaatgtcggcacaggaaagtccttgaagaacatgagaaacaggagcttcatctgggctctgtgatggtgccgttgtatgaattgaaatccatcagggtgggactggttatctgtctaacaaagatgcaatgagacatgattgagagtgtgcttcgggtggagtgtttcttacattttgaggttaaaagccttttctgtcattgtttttattatttatttatttatttttattagagatggggtcttgctacattgaccaggctagtcttgaactcctagcctcaagcaatcctcccccaccttggcctcccaacgtgctgagattacaggagtgagccaccgcacccagactctgtcattgattttgacaagtttttttttttttttttttttttttggttgttgtggttttggaagttttttctcagaaaggacatacttgactgaatttttctcagagcctaattattatttagttatttgtatttatttctttttgatttcactacagtagccactatatcttgagtaaatttagcttttaacttgctttatgttttggtagatcttagtgattatgcaatttgatgatgccattcaatatcaaggtcagaccacagcatgtacaagaggttgctgtcacgtgatagttttccattttcatctcttagtatgctctcttatttcttgctttgctcattcaatgaatgttttaagagtctgattgagatattacctcatagtagattactttcccattaatgtttgctcactcatctgtaggcctaggaagctttatatctatttacaacagcgactaggaccaatagtgtgctgttaaatgcttaggaaccagttctccaggaaaaaaaagtcctgattggcaacgtctggccatttccatagtgtaaatctcccactgtggctgatttccagctatttctggtttaacaagtggctcacaaaattcttgaaagtttatcaactggctttcaccaggaggatggctccagcacccaccacacctgacaacagttatattactttacggatgataaaaagctttatcatcgttttatttcatttctgatttacaaaacaaccctgtagagtaggtggtgttatacatgaggcatctgagactcagaggcctaagtggctggaagtagctccagcagctattattaggcagagcagagacggaatgctgcctctgagctgagcattcttggtgttctcatcactcatggcaactgtttcccattgtgaggattcccttagtggtgtcatatttggactccaaagaagtatactcaagaaatgactacttcgatggttttagcagataatttttagttatttgaggataagaataatagtctgcttatgaaagaacttggtaaatttttttcttctggttttcagacaccatttctgtcttaaaatgaagtatctggtgtatgattgctttgtaatattttgttacttaagggtggtatccagacaacccttagttaatgttatagaatcagaactagaaagacctcttcattcttcacttagagaggatttaagtgtctctggccatttattgggttaataatggtgacttcaggtgacccaggaaacatctggatatctttgctgcacttggaaagacatttagtttggtaatattttcaaatcatgtgatcatttcaaaatgacttgcaccatggagtgatgatgtgatgctggcagcagctgctgtttgctggagatttcgtgtgtcaggcacagttgggaatactttatgaatattagtttatttctcaccttgaaggtagacattgttctcagtttgttgaaatcgaggctcatgtaagtaaaaaatgcccacattcatagcaaataagtgacagagttagtctctgactctgcaaaggacttatatggcttttgtataataaagtcggtcaccccattttggtaataaaagggataataaaagaccaacatgtcttcattagcttgcagataagctccaagtttcagcacgtgcatagtttgtaatgccttcacagggtctgcaggctcattgccatgaaaatatagaactaacaagaatttagttttgattgacatagtttataaaatgttcttttttttttttttttttttttttttttttttgagacagggtctctgtcgcccgggatggagtgctgtggtgcgatcttggctcactgcggtctctgcctcccaggtttaagcaattttcccacctcagcctccacagttgctgggactgcaggtacccgccaccatgcctggctaatttttgtacttttagtagagaaggggtttcaccatgttggccaggctggtcttgaactcctggcctcaagcaatttccttgccttggcctcccaaagtgctgggattacatgcgtgagccaccgcgcctggcctaaaacattcttttaacaaaagcatagctttatgttgaattcaggtagattcgaaccattgcttttaataacacaatatgggttctttcagactcttggggtagattgaacttctcataaaactgtcatgggacagattgcaacttctttccaatatcagaatctctaggtgagttcatccatttctttgccctgggctttttaagaaagtagggcaatgagtccctggtttctcatctccgtaagaatgaaaggatgctggagccaaggtctagtctactgccagtttctccaggaacaatgtggaggaaaaggaccagtgtagatcagaagtccatgagcggaaactcagaatcaaagcggttattcaattcttcttttcttggaggaaatcactgtgtcgcctgaagagaaaaatgccctttgctcttgcactggggagttctgtttagtgcctttccacacaaaagggctgtactggctggtactatagactttttttatgaagatctttttcataaatccttttgcagagtatagccaggtagcagtatatgaacattggaagtgaaacagttttcgtcacacaaaattaacaataaaaacacatgcaactcatcatttataaaacgatacttgcaatttttcattattctcatttctgagggcaaattttcagatgaaaacagaaaggaattttagaagttttcatttttttttcctacatcaggcttccctatatgtcgtctgtataacaagcaccttgatctttcattcagttataagaggctcataagcgttgcctctgttttctatatattggtagtgtcattagaaaacctgagggggtgggccgggcgcagtggctcacgcctgtaatcccagcactttgggaggccgaggtgggcagatcacgaggtcaggagattgagaccatcctggctaacacagtgaaaccccgtctctattaaaaatacaaaaaattagctgggtgtggtggtgggcgcctgtaatcccagctacgcaggacgctgaggcaggagaatgacatgaacccgggaggcagagcttgcagtgagccaagatcgcaccactgcactccagcctgggtgacagggagactcgtctcaaaaacaaaataaaacaacaacaacaacaaaaaaatctgaggaggtggacaccattttttggtactgaacgacgtgatgaccgtttaaaaagaaaggtagatgttaagaaggcttccttatacaaaaattcttgtatattgttccttccaattttatttttgttttgatatataaaatcctatgttaaatctctcatcctgaatatcagattactccagaaggagaaagtagcagtctaattattttatttggttgcatggtagtcttagtacaattaaatctcctttgaaagtttctcagttatgtagttatgaatagcactccacaccacggctgtggtagacctggagcggtattgggcccaggtcacagaatgatcacggaaggactttagagatcacctattgagtccctgttttagagaggagcaagcaaaggcccagagaactcactccatttgccgaggtccgacaagtgtgtaggtgagctggagccagaaccctgtctttcggtcttcactctagagctctttccaaacaaacatgctgacctgggagtctgacaattgctgtatgctgatgtttcctatttgaagtccacatgtctttgcaggggaagagaactgtctagtatcattcgttaatgcccactcttcatgtttgccaaagaccaccaatacattgggcagtgattgtgttacactggtttgtttatatgtcggctttcagtgatgccagaaaatcaaaaggaggttaagaaatcccagaggttcacccaggatgggaggctaaacctttgttgtattatgagtcttaattcaagataacataatctttagcctaataaacattaggttgaattttgaaaatgtaaacactaactgatctgtagactgacgtctatttccttggcaatattggccacacccattaaataataacttctcattctcccttcccccagcctctggcaacctctgttatactttctgtctctgaatttgactactttaggtgcctcatataagtggaatcacatgacatttgtccttttgtgatacgatattttctttaaaaagaaaatgaacagaaacagtacatgagagaagtcaggtctgcagccagtgtgcctcttagttccatattcatacaaggccctcttggaagctcagctttggagttggatattatctcagaagatatggcagcttaggaatctggtactctaaaaacagatttacaagcattagacttttttgtatatgtgtgtggtcattttagtcttcctgaaagtggttaagaccaatatttctaggcagactatagttcacatcatccagttctgtaagtcttggattatcgatctcattgtcatggcaaaaaaggacagggattactcaactcattactcctgtgtccagacctctgagcctggtgtgtgtgtgtggctcagtgcctttcccatagtggcccacatccccccagggccctgcatgaagttcctgcaagtctaccccctgcacgtgcagagcaaaaagagcttcctatgggagctgttctccagaaaagacagaaacccgggccctagagaaccagaagatttaaattccagtttcagctctgccattgactaattaggcaactgtaggcagttcactttgctcctttggaccagagatttctcatctacaaaatgaaaaacttggatttaattatctctgaagtcacttcaagcagaaatgtaacaattctttgatttattaaaaaaaataacatcaatgataatgaccaacagctaacacttattacaaggctccaggcactttcgaagtccttaatatttaatgttcactactaccttaggatataagtactgtgatgcagagtcctggacacagagaagtcagcaacttgcctgaggacagcctgcaggacacagcactgtgatttgaacccagagagtctgacttcagcccccagcgctcaactactattaattgaaagggcattgaagagacatgatgtcacaataaaaagaaaaaaagaaaagaaagcatgtcttcgactttctagtcgtcgtgctttgtatggattcttctttcaaccttgacgaaagggtataattaatctgtaattaaagtcatgatagtttcttaatacgaggaaatgttgtcattgcggttctctgaacacaagagggcgctgtggcaaagcttaccgtctgctcatcctctgccgcaggagggtacaacttcgtgggacaaacttcaaaagaaagatgccatttctaagacctcatttatcacctcgggatagccagtcttcatgcctttaaaatacagaataaaaataacacataaatcaacacaattacattccttcttgatagcatcaccagtcttcttgaggcctggcgtcaaacctctgcttcagtgttacgttatggggtgcgcatgcctccttaatacccaccttgctggtattctccagatggctgtcttcttagcagtagatggaattaagcaccataatgagggatattttatttaaatctgctttaaaaaaatcttccatgacttattcacatgtctggttagctatcacactgccattccatgtgatcggaaatgagaaagatttaaagaaagtaattgtttagcatgcaacggatgtacctcttttgcttcagatgagaataggcagcatagaagaactggggctgattcgtggaaggtttcccgtagctagaccctggaggctgtaaaaagtggtttggaactgtgtttaaaaaataataataatagagggaatagtgaggtacccaggaggagcagagagcgcctgttccagccatgggagcatccccatcagatacatagatgctcttaattaattaggctgctagtaaaccctcctgagtgtgcaagacaggaggaattcattttcaagctttaaaaaaaaagatgagtcttgggcacacagccctgtggcccatttgttattgtcgtgttacccataagtcagcagttttcctctcctgttgttgatagatcttcccatacagttagatttgtttagaaagaaaagttttaagtccttgcaaatgattacaaactgaagaactggaaaccctggttaggaaacagttggagcactatgtatggcttaatgaaaggacacagtctttttaatccaccaagcctgaatcatcagcttggttaagactatctgtagaaggtgagcagagcacttcaaacctggctattcgcaagggagagaaaaaagctgccactgtccccttagcattcctctgctaatcttccatttgtattgcaataagtgtgctttggcattgagtgtgttttaaagctcctgcttagctggctgggggacaagaaaaaacaaaacctcaaggacactcccactcagaggcataaaaaaataaacagttgtttctgcttttgagaagaagtcacatgcatgtggctggcattctcaggtgggcaaaggagagtgctcggtagcacctgccccaaaccctccgttctcccctttttaggtcagaagagattctgctttcctatcttgtctccagttttcactcttagtccgtattttccctccccttttccactctgtccttaactcctctttccctctttcatcgttttcctttatttttcatctctttctttattccttctcaagggtttgccggtggttttgctaggcaatactgagcttcaaggccattgtcatggaagtttccagtcctgggatgtgcttagaccagcctttaactatgcatcctcaaaacagctggcagcctaatcaaaccttattttttttctctttgtgagagaggtgaagaagatgataacatgaaatgaaatctagggcctttagaaagagtcagcaaaccaggcgcagtggctcacatccataatcccaacactttgggaggctgacgtggggatcacttgaggctaggagttcaagaccaggctgggcaacatagcaagaccccatctcttatatatatatatatatatatatatatatatatatatatatatttagctgggcatgatggtaagcaaccatagtcctggtcactcaggaggctaaggcaggcggattgctcaagctcaggagtttgaggcttcagtgtgctgtcattgtgccactgcactccagcttgtgtgacagagtaagaccctgtctctaaaaaggaaaaaaaaaaaaaaagagttaccggttatacatttttgagaggagcaatggggaaatgcaatcatggggtaataataatcaggacaagagcaggggtatgtactgtcccccaccctgctgccctaaatgcgaggaagaagccacgttgctggacccataatgagaagcttcagaaggttgatagagagtgctgatcttgaagacatttagtctgggacacagactacatatcagcatgtcaaacatatcagcttgcttgaatgaatgagtgaatgaatgaatgagtgaatgaaaagtggtgaaggaagaagatggttgggtttgggagaagaatatgcctgaaagatatacaaccaccggggagtctgtcttgtctttacagacacttaactcaggaacagacttgctggttgtcttgagtgtgaagtgcaaaaagtaaaaatggccctcaacaaaaatataagtcaggcctgtgttagagatgtcaaagatgaagacctttatgatgatccatttccacttaatgaatagcgtcttagtccattttgtgttgctataatggaataattgtggctggggaatttataaagaaaagaagttcatttggttcatggttctgcaggctgtacaagaagcatgacactggcatctgcatctggtgagggcctctctctcttgcttcctctctggccatgtgatctctggccagagaggaagcaagaaagaggaggaggtgccaggctctctaggggaactaatagagtgagaattcattcacccccgagggagagtattaatctgttcaagggtgacctgcacctatgcctcaaacactgcccattgggctccaccttaaacattggggagcaaatcttaactttagctttggaggggccaagtatctaaaccatagcagagtctctttgtgatgatcttgagatgaaattgtttgggccttggttcctgagaggggtcttgccttattcagcagtcatatttttttctagataaaattcttactatcctttagacctggggagagcccgtgtatgaaaaacagaacacaaagctgaactttaaataggaaaaagctagcaaagggactacctctgggggcactacttgagcctgtaagcagtggttataggagatctgagagtacgggggtcctagagacaggtcagttcttagggtggggcaggatataagaaagggagagtgaggaaggctcagaagatgaggtttgaacacttggccaccattttgcctgggatcatcaggggaagctcctgatatgggaacatcactcccaggcaggacaccaagaggcaaaggccagtgtgctctatttagtaagaaggtaagataagggccagtgtgataagtgcatggagccccatgggcatccaattaataaaacagtgatggaccactacaatttaaagtcctttcttagatgagctaggcaaaaggttctaattagagatacctgtcttcccctcttttccctataatgcatccaaagatctcaggtgtaatagatttgcagcttgtgctaagtagttggccagagtgtgctggcttctgtgacctacgtctctgagcggcccgagctgtctgttggtgttatcctgagctcgttgtgggaaggcggctggagcagggtgtgctgcccatctgtggctccatcagtttccataaggcttcagcttgatcagtgcagcacgaactgtggcatgtttggggcttgggagattgacagccccccaaaaagccctcaaaacatggtcaagaggacaaacgagaatgatagacatatcttcactattgccagcctattaacctattacaaactctgtttttagagattagccattagtttttccttccaaaattattatgctgttgtcatttcctccacaaactgagatatgcctggtgaaatgacttaatttaaaaagtaatttagattatattttaaagaataaatattttcttcaaacttatctgattttcaaacgatcatgactttaattttgctctagtaatgcactttctgagaataaatgggaatctcagttttgtaatatgtacccgcatttttcttcttacagctattgggggtgcactgttggggatgtggtgggggctggacctgtgtggaatagggcagatactgtgtgcgggtctccacttctcaaaggagcttcaaagctgactgcactcattgatgcagcgagcccagggccttgtgatgttccctttcttgttggttggtgctggaaagtctagagtcacagactccttttggactaggctacaaatgcatatatactttgcagagcattgcctattagtcgccattctctcctcagagtgtaggcaggttccgagggcagcacctaatgtgggaagagagaatagaaggttctggggaaggggacccactctgggcagagggagaaggatagggaggtggtttggggaagaatcacaattatccttactttaattaatacatttccttggatggcaccaacagtgaacacagccacacgctcttctgcccatagtgctaagtgggttctctctttgactagaattgtgtcgttgatgtggaagtgcagttgaattcaaacgatctgtagctggtggcttttattcctgaagttcaaatatagacaaccctcttagcaggttctaccatagttagccaaccatgtgttaatctccgcctctttgtcttctgtcttaaaggaagtcaggccaccctaaatcgcggcctctcatgtgtgcctgactgtggagagtgtgattttccagcagtctctgggtctctataatgtttgaatttgcctttggggtgcatgcgtgtggtatgtgtggcatgtggggtcaggggtggtgagaccagctctgaattgtttccagggcagcttggtggcaccctggccagatcctgcatgtgacatttcccaacaactctttctggtctgtgtctcacctgtcataattcaaaggagagccatggactgtgtgcgctagattcaccttcagagactggagagtcccatctctgtaccacagtggacacctggacttcctctggctttctcttggggactctgccaggcagaggccctcagccgtgcactgggacagttctgtgggcagtggcaggaagccttcagtcggtgaacagcgtgaagacagcctgatgcatgcaaggcgtggggatgtgattgtgtgagcagatcaatacctatatctcaaaaatgagaactttcactttagtacttgatcacttaccctattgaattatgtaagtacttcagtctcttcaacattggctttctttcattctttgtttttttaatctcccatcttagtaatgaaaaaaaatgtatgtgtcatgtggttcttttgtaaggttatttctctccatttgcttgaaaactttcttattactcctaactccttttattgatttaatgaaaccaaatgctcctgaaagtttgaccctgatctagtgatacctgcactctctaggtccctaaaagaccccacagtctgatgctttggctgcagatggagtcacagagatgattcagctttaaagtgtctacatcatagattggaaaatgcctttctagggctgaagttgtagctgtttcctagacttctgtttattttccatttctttacccactcctgtttgaaattctgctgttgtttgcatactgtttgcctttgtgtccctctttccatctgttcttaaaaaaaaaaaatcaactgagttttattttaaaccaatccagatgacaggcacacagtcttcacaatgctttggaaaccagttgaagaaaattctcgttaaattactcatccacccaactcattttccatacatgatctattgttggggtgcctgcctgttttcaagataagtgcatatttcagaggcaggttccttttaccccagataagcaattatttaagaaattggctttgacatacattttcagttttaatttttccttttacattctgaaataatctctggttgcatgtagcttcccactactgcatataaagatgtattccaggcatccgtcaggagtttgtctattccatgaagaagacattgctgtggaagaagatggtgggaggcctgatgtcctttctgtgcagccctgcaagggccttcacctccagggcctaatctcacaagcaccgactctgcactcagatttccgacaagaacttccgctgtaaagtggccatgttaaggagaccttgggaagaacaaacccattatctgatattgagtcactatgaaagatttgggagtctttcccattagtgccccggtaagagaggcacaagaggatcatgcaaggctactaatctccatttcaaagccaagaagaggtcatcgatttatagtagggctgcagatcagaagcaaagcggacttcagcctgatagcagtcaaaagacttgtgtttcagcccctttctatgatgtcctttgactagcgccccttcctgtgtccctcccctgcattccatagcattgggtcttctacaagggaccaattagtgatttgaaaaccaaagtgaatagagtacttataaaatctggtggtgcactcacaggaggaaatgagttgggagggtttaggaattgtaaggacaagtttactaatgagaaggcaggttaggaatatccttaaggaaaatgcagatgacaaatttccagctatcaaggaaaacgggttcaacctcataattagatcattcccgcagagccaaggaactgcaaaacacatggatcttcactgccatgggagactgactctaagaagagaaagttgtcagaggggttctgtgtggaaaatgtaattggaatccccaaattatgacttctatcattggaagagggcatcttaaataatttttttttttgagacagagtctttctctattgcccaggctgaatgctgaagtgcagtggtgtgatcttggctcactgcaacctctgcctcccaggttcaagcaactctcctgcctcggcctctgagtagctgggactacaggcatgcaccaccacgcccagctattttttttatttttggtagagatggagtttcactatgttggccaggcttgtcttgaactcctaaccttaggtgatccacctgcctgtcggcctcccaaagtgctgggattacaggtgtgagctaccgtgtctggccttaaataatcttttattttttatttttgagaaaaagtctcactctgtcaccaggctggagtgcagtggcacgttcttggctcactgaaacctctgcctcctgggttcaagcgattctcctgcctcagtcccccgagtagctgggactacaggcgcacaccaccacgcccaactattttatttttattttttagtaaagatggggtttcaccatgttggccagggtggtctcgatctcttgacctcctgatctgcccacctcggcctctcaaaatgctgagattataggtgtgagccaccgcgcccagccaatattcttaaatagtgatgttcaaacacatggcctggccaaagacttcctaactcactctcattgatttttgtcccttccattcaaaaacacttgttttcatagtcctgtgcttcaaaacgataaaacaatttaaccctgtattaaccatctgaattattaagaataccaggctgggcgtggtggctcacgcctgtaatcccagcactttgggaggccgaggtgggcggatcacgaggtcaggagatcgagaccatcctggttaacatggtgaaaccccgtatctaccaaaaatacaaaaaattagccaggcgtggtggcgggtgcctgtaatcccagctactcgggaggctgaggcaggagaatggcgtgaactggagaggcggagcttgcagtgagccgagatcgcgccactacactccagctctagcctgggtgacagagtgagactccgtctcaaaaaaaaaaaaaaaaaaagaataccatagcattaagtgagataccaatgaagacatgaaaaaaatctccatcagaaactagggtggagacatcgtaagccctcaggatccaggcagagcatcatcaggatgtggccatctggttctctgccaaccttatgctgtcctctcacttgtccaacccatggatatcaacattgatagaaaaatcaatctctatctttgtaaaatctgccctgtctgtggcaagctgaatttttattaagctgtaatgtttggagtagatgatccaggatgctatggtcagtgatggggagaggagaagactctgcagctgaacctgtggggatgtgagccaccagcccccagccctggtgagtgaaggccacctgtcagctgagtaaggggacatgagccaccagcccccggccctggtgagtgaaggccacttgtcagccgagtgttagacagccaggggctcctcatcctgctgcctgggcgctctggcaatgtctgctgctgtaaggatggccagctgcctaccaaggtttgaaatcatgagcagtattgaccaccccttgggtacttgggcaattcacttccctggccttgacctcacttccctggccttgacctcactgttttctcatctgtaaatgagaaaaagagttgagatgatctataaatttccctctaacacatctaggtctgtcattacttaaacatattagtttgaaggaactaaactgtactccctctgaattaccaagtacaaggctccatggtcattttcactctcctgtctggtgacagcaggtgtggcttggctttgctcttctccttccttccaactttctcctaaggtctataatggacaacttagatcattcacaattcccccacacagtttggcttgggaattggggccacaaataaagaggacaaaagagggaaaaagcataaagcaaactgtaccagaaggtatgtgaatggcgaggacacgttggctaatggggccatggtgtagcccattaactcagcttcctaggaatgctcttgaactagtttctatttggaaatgactgataaatgtgggctgaaaaggcccgagagccccaaaatacagcaaggacactctgaaggaccccctctgatatacttgggatgtgtgtccctgcccaaatctcatgttgaaatgtaatcttcagtgttggaggtagggacctggggggaagtggttggatcatgagggtggatccttcatgaatagtttagcactatcccccgcattgtactgtcctcacgatagtgagttctcatgagatctggtcatttaacagtgtgtggcacctccccgcttgctctcttgctcctgcttttgtcatgtgatgtgcctggcctctttttgccttctgccatgaatgtaagcttcctgaggcctccccagaaaccaaggagatgccagcctcatgctgactgtaaagcctgcagaacaataaaccaattaaacctctctttttaatacattacccagcctcatgtatttctttatagcaatgcaaggatggcttaatacaccttcccatctcatatgtcttttaacatcttaagttcatagcaagatgtagcaacagtggctgcagcctacagagcaagcttgccttttgtagaaatggtgtaattgccactgacccgtgatagttgcaatctgggttttaaagctttgtgtctgaacactccacacgttttagcattcctgaatcctagaattcagtgctgcaaatgagtttcaagagggtttatggttttcaggggccatagcaggctgtctctgaagccacaacagaggtgggcaggctacagctggagtaatcatgactgattcttttctgctgctgcctcagtgacaggtgtgtggatttactttgtccctcccacctttctttgcttcccaccctcattgttaatggtaaagcaaaggcttagggtaatgggcagggtgtgtacagggtgcccactgctaaatggttccacctgggtggagacaggcctgatgggagccacagaagagtactgatatcatagccatccaaagggccactctggagggagagcggagagcagactggggttacatgatcagtgggtcaagtcagcagtcacaaggaaatctccccaacaagtaaagaactaaaaattagaaggggaagatttagtttaatataaggacccatttcttatcaagagctctgtgacacctaccattctcaggggtggctcacatgagcccaccttcttactgcagagaccaaccttgtacagccaggaaaatttactggatgttcacagacatctttgttgtatattcctgacataggttattgacaagcactgttacggttttgagcaccaagagaaaaaggtcatgttgtactagtgaatcaacataagtgtaatggctaaattcaatgtacaatgggactataacttacctcctttactgtttaaagaaaagtcaagatacacgcattcagaattttgtatttttatcttgttggcagagggaaaaaataagtattgatgtaatcccaccaagtaaaggttaaggtactcaagttaggctgcttgcattcaagtcctatttctggttcttactaaccagctttcaacgcaatacttgaataccatgaatttctggttcctcttcccattggtgttcagtggatgttaggtattaatgttattttaggtatactctatgagactgtatggtacagctgcccactatcagcctattggtggaacatatatgttcagatcagtttttttcctccatgtaactttgcatggttgcatttacatttaaaacaaaaaacacaactgaagaataggaatgcatgactgatgtgcatggaatcagcttatttcgactgaacagatgaaaataaaaaatgacttaatagctaaattcaaagatataaaatgagtgcatggtaaatggaaattgagtggtaagtatctcaattcatattcactgagggcaagatgaagacaaatgaactcaaattgcagcagaaaggaattaaacattaagaatcaaacttcttaacttcagaaaatagtcttttgaaatgtctgatgcaaagaaatgacactgataccttaaaacagttcattcttttattaatatttattaagcatattctatcaggcaggtgctgggctcggtgctgcagatacagtgatgaacaagacagataggcactctgactgcatggcccatagtctagttggagaggaaaacttaaaacaaagacacagacaggcaattataaattgtgacaagtgacatgaaggaaggtacaagagtgtgaaatggggcacctgaccaggctaggggcagggcacagagagaccgccctgaggaagtgacaagttcagatctgagggacaatagtaacagatggggagaaaagagcaccagaccctctgaacaagcaacctgtgcaaagactgcaaggccgcagggggttgctggcttcaagggatggagaaaagaccagtgaggtcagcagagatggggagctgagaggggtagccctgggttcaagacacaggcaggaaccagactaagcaggttcttgaagcaagtgaaggactttcatctttatataaagggcaatggaaagttgtcaatgtcattgtcattttttttaaatgccttttttactggagtgtaatatgcatgcaagaaagcacccataggggtgagctgggtgaatttcattgtgaacacatcaagcaaccagtaccaaatcaacaagcagaacattattaaccccccaaaagtcacccttagcccttccaagtcctcagcatgttccaaaggcaaccctatcctgactggtaacaacactaggttaattttgaccatttagaaactttatataaagggagtcataccatatttattctctgtgcctggcttctttcactcaacaacatgagactcatccagattgctacttatagccataaatcactgtgtgaatagaccatgatttaattatcagttttgctgttgtggacatttgggtagtgtctggctgtttggaacagtactacaggttgagtatcccttatctgaaatgcttgggatcaggagtgtttccgatttttttttttttcagattttgaaatatttatatgatacttacttgttcagcattcctaatctgaaaatctgaaacgtgaaatgctccaattagcatttcctttgagcgtcatgtcagtgttcaaaaagtttcaaattttggaacgtttcagattttgagattagggatgctcagactgtactatgagctacttgttgattctatttcacctgatcttcggtgtttttctaagagtggaatttctgggacttaaggtatacatatgttcagcactaatggatcctgccaagcagttttacaaagtggccatttcaatttgtactcccaccagcaatgcatgagagctcccttaaaaggtttgctatagccagtgatgtgatcagatctgtgcttttcaaagaccatatggcctcctgtgagcagaatgggctaaagaggcaggagtgcctggaaggacctgtgggggctgtgatggtaggtcaggcaagcagaagacagggaaaggccaggatggaaagaagtacatggacccaggagagatgggtggggaaatggctgatgggctcagggaatgttttgggtggggggcatggtgggcaggagaggggagaggtgacaagaatgaccctgttcaagacataggcaggaaacagatgggtggtctatgattggttagatggtagtgtttgaactctggagatggatcagagatggggaggtgtggatcataattctagtgcattaagagtacataatttgaggtgcattagctatgtccaagtgggaatcaaggaagcaattagatacagaggtctggactcagagtgaagtcccaatggacatgcaaactggagagtcattatagcaatatgggtgagtactatggtttgaatgtttgtgccttccaaaactcatgttgaaatttaatccccaatgtggcagtattgagagctggggcctataagaggtggttggatcatgagtgctttgcttttatgagtggattaatctattcatgaaataatgagctaatgggttatcctgtaagcgggactggtggttttataataggaagagagacctgtatgtagtatattagcatgctcagccctctcaccatgtgctaccttgagactctacagtgtccccaacagcaagaaggctctcaccagatgctgcccctcgaccttggacttttcaatctctgtaactgtaggaaataaattccttttctttataaattactcagtttcaggtattctgttatagcaataaaaaccagactaaggcaatgaggaaatgtcacctgggttgagagtagtgagaagaatgtctcattttgttatttcttagtttgagagcagttattcaaattaaagtttgaatatttaaaaaatttttgctcttgattttatttcaagttaaagcttcttaggcatgtgtttatttgtagggcagagatgataacactgttataggaccgacaggttcgtatgcccactgcacagtaatagacccattacatggagacagcaggatttgcagcagaaaaagagttaaaggtcagtgggcaccaagtagagaggggaggagaccctccaatccatcttcccaagttgttctgggttggagtttttaaggggatcatggagagcaaggcaaggtggggggggggtgaaatcatcgggatgtggaaactgtattcttgggtgggtcagctcctaagggatccctcagaccagctgagtcagccattccctcagaatgcaggacctgaaggaatatctcataggaaaaacttaacgtttcatgatgttcaaggtgttatcaatagagcagttaaggggaactgtgatctagggtctatgtgattccaagacagtaggcagcaaacaactctgaggaaggggttggagcccaggctggcctcatgattagcgccgagtgtgctgcaagctgggtttattttcctttctcccctctctttcttccctgacgaattttatttaaaaaaagtttatagggatggtttcaacaccatgctgtgggcaagagaagagagataccttgttctctgctgcagggcaccacagtcaccaagagtggactttccctggcaacagggcctctgcattggtctgcttgagctgccataaccaaagaccacaaaccgggtggcttaaagaacagacacgcattgttgcactgtcgtggaggttagaagtctgagaccaaggcgatggcaagattgcagagctctagggaaggatctgttccaggcttctctccttggcttgtaggtggccgtcttctccctctgtctcttctcatggtcttccctctgtatctgtattagtgtccaaatttctcctttttattagaacccagtcatattggattagggcccactctaatgatcctgtttgaactctgattacctctgtaaagaccctatccccaaataagttcccattctgaggtcccaggggttaaggtctccaacagaccttttatggaggggggcacataattcaacccatccacactcccagccagggtcccgcttcaagacgagcacttcctcttccttcaccatgcactggggcaggtgactctaactagtgcccatttcgtgtctcattctggaaactatgccgatcagtcaaagtttccagagccagtgaaatgttctcatcacacgaggcttctgaacacccagaaattttgaagcaagaacatgacaataatcatcactctcattcactgtgtgccatgtccttgcaagttcacagctagcccttacaacagcctgcacaggtctgattttccactctgcttcattgatgagcatctgagacgcgggagcataagggaacttgcttgaggtcacatgcttggtcggtagagactcagggtctgcgcccaggcttgccagcccatctccactcctccctgctgtgggcccagggcacagcggccacaggaggacttggctcttctttcaggctttgcgggcacagattagctagacagagtaaatatgggcatagcgattgttaacggctaacttttgggtgaatgcactattcttgccatctcaggctgatttatttgcagcactggtagtcagggtccctatagcaagggaagagataatctctaaatattccctggagccatgagaaacggccaggtaaagaagcatccttctttcagctggaacacggcgatgttttctgtcacctcaaatgaggtgatctccagaatcccctcaatcctgtctcattcattcaggcacaaaaaaggagaaacgtagttgacaggaattagatttggaaatctttcagagaaaatgtgtttgatttttctgtcccacacctcagcagtttatttcacactgcgcttattggtctctttgtctcacttctccttacataaatcctctgggtgtcgtttgaataatcaaaacgtattagatatgaaacataatgtgtatcatgttgcatcatgctactgtacctgcatgttgtaatttgtaccttatttgctgtctatgcaatgaaaaggctttcaagtttttaggtcagaaaggtttaatcactgtccctagtcaggtttgcagcacagagccaaatggatggtgtgcatttggacctgcccttggaagtcaggctgtgattagctagggcaaaagtttccttatctaggtgtgaacgtggaatggcctgaaatgtgtggacagtctattatgtgttcatcactgtgcataatgatgggcctgtagggatgtctatgacacgcaggatacagggctgggcacctggttgttggtatcagatatgtaggagaagaaggaatgggtgggggttggagagaacacaagcacaagcataagacggttctgctcccaagaggctcattcgtcactcagtgctgtagacacacgggagctgccttagcacagagcgacagatgccatgagacaggcgcccactgctgatgtgggcagaaagagatgtgcaagcgaagggcaacagatttggttgctgagattaataagaggaatcaagaaatgctcccaagagaaaaatgatacttaatctgggtcttgaataaccattcattcattcattcattcttctttctctctataatattaattagatttctgctaataagtacctagaaatgttctaggtgtaggaaattcagcaatgaacaaaaaaaacccaaccctccccccagcaaccccttgccgtcgggagctcacattcctataggtaagtggtagtggtgtggagaggggctggcctagtgaaaggaacagtgccagctgttgcacagggacttgtgatgaggttggtgtgagtgggtggccatgtggggcaggtcagagaggaggcatcgagttgccaggtgctgggtcccacatgaggagtctgtgtgccaagccaaagagctttctcctgaaggcctcaaggggccactattggtctcagcaaggtgggaggtcatattgtcagacttgtgctgggcaggtgggtgcaggttagaggcaggtgaggccacaggcagggagcctgaggcctggtgagagctggtgagagaaattcaaggtaaggatgaggatttcaggatgagtctcacttgctggcttctctaactacatggggatggtgcaattgactgagggtaggatagaggaaaaggatcaggtgcaggagaaacatgatgcgttcagggttagccaccttgcttgtgaattctagaattctgccagcctcacctgagagcccctcagaagtaagaggggcttcttactgtggaggaagtgtcagaatgccaaccaaagatggccagctaaataaatgacatgcctggtggtctgacatgacaaatcctgagggtcccttgcccagggtgggtggcaggggaatggcagttcacattcaagatctaagttttgagagataagaatcatctcctttggggtggggcagctgcattccacactcgggacccggccactcagtgcggggtgatggtgcagttcccagggactgatgtacctgctctgcagtggcaacctccgagtgtgagagaacccagctcttttttggacaattttgcatctgactcattgttggtatttgataacatttgttatgctaatataacaaatacaataacaggaaaatcagaaaatccatgtgtactcaatgtttagctcccacttataagcgagaacgtgcagtatttggttttctgttactgcattaatttgcttaggataatggcttccagctccatccatgctgctacaaaggaaatgatttccttctttttttgtggctgtgtagtataccatggtgtatttgtaccacattttctttatccagtctgcccatggatgggcatttaggttgatttcatgtctttgttattgtgaatagtgctgcaatgaacatacgcgtgcatgtgactttatgatgaaacaatttatcttccttcgggtgtataagaacaatagacgctggggcctacttgagattggagggtgggaggagggtaaggattgaaaaaccacccattgggcactatacttgttacctgggtgatgaaataacctctacaccaaaccttcatgacatgaaatttacccatacaacaaatcatacatggacctccgaacctaaaataaaagatggaaaaaaaaaaaaagaaaaccagaatataatctgagttctgtctttgtgtgatccggttttacaggaggaattaacctgggatgggggaaagaatgcatttagtgctggaatatataaggagaggctttcctttgtcccctcctctcttctctctcccccaggattttttgtccttccgtgttccacctgatccatggccaactggctttagaagttgttattaatagttcaccatgctcattttcatgaaacagagggaaaggcagcctcttcatttgatgtctagttagcaaaccagaggtttgacaccagctggtcataacagacatttttaataaaacttacctccaagttaaaataaaaatgctgccttagagattttgtcctgaaacatacgaaaaaatgacaggtgggatctctcatgcaaaacttctgctagggctaaaggaaaatatctgataaggttgtttgcccatgggggaaggattaattggattttctgtcttgcccctagtgtctgaccctctgttattatgacaggaccacagaagttttgaacgctgaatcatagtttatagttttagcatttttgagctatggagataagagtgagggaaggagtgtgataggggagtgagttcccacaatactccggtgatagttattgtctgcctgaaaatgtgaatacatatattcaagcccgatgtagcctgttcgaagcaacccagccgggcaatgaaagcctcagctgaagatcataggattaaatccaggctcccctctttcaagtaccttctcatgctactgcatttatgtgggtagtctgggattatgtctgtggtttgtttcactattttctggatcacttctgaaccagtccgtgtgtcagtcctgtggatatgcatttcatgaatgagactctgaggaattttctaatagtgtctatggtggcagtgggaaaaggggaggaggcagagaaagaggtggtagcaagagaaagaactgtgtggagctcgagctaaaagcaggagctaagactgcaagatcaaatgattcccactcagttgtcctagtctctgtctttgttttctgtggccataacagaacaccatagatttggtaatttataaagagcagaaacatatttcctcatcattctggagactgggaagttcaagatcaagggctggctcaacagaaggcctcttgctgcatcatgccatggcagaaggtggaaaggcagagagggcaagagaaagcaagcaagggggggccaagttgtccttttctaatgaaccccctcccacagtaacggcgttaatccattctagagggtggtgcccccatgacccaaacacctcccattaggccccacctcctaacactgccacattggggatcagatttccaacacattaactttggggacacattgaaaccatagcactcccctatagcaatgagtaatatccgcatagtgattttacttattaaataatattgacatggcttcctctttatggtttgctagtggtaaatcttcaaaactcttgggtagtttctgtggatataaattccaggtgaggttagttgttaaggaaagaatttccatgaaagaaaaacgtgtctgagttttgaataaggaaagacatacattgtgggtaactgaaatgccattttttcactcctccttcccccaggctctaaataccattgctgaattgaatccgtccagtttgcacgtgtgtctacagacatgtgtcttatggaatacaaacaatatgtgcttcttcttaaggttttgttactttgtcccttggtggtaagttttacaaaatgatttgaaatactcagcgctcaactccaaaagccaataaaacaggaggaagacattgggtatgatttggaaataagcaaaacagaacagacctgactttctttctctttcttcctttcttccttccttcctttctttctttctttctttctttctttctttctttctttctttctttctttctttctttctttctttccttctttcttttctttctttcttttctttcctttttttttttttgaaatggagtcttgctctatcacctaggctggagtgcagtggcgccatctcagctcactgtaagctctacctcccgagttcaagcgattctcctgcctcagcctcccgagtacctgggactataggtgtgcatcaccatgcacagctaatttttgtatttttagtagatgcagaatttcaccatgttggccaggatggtctcgatctcttgacctcgtgatccacccacctcagcctcccaaagtgctgggattacaggcgtgagccaccgtgcctggcccagacctgactacttgctagtataattttattttaagtgcacgttattattctgctttctccaatatcagacagctggttccttcttgaagcaactcttaaagacagatggaccagccatgtcttcaaagtgttggcttcttctgtggctcccattttcccgtttatcctagtgccttgacttcttcacttgccaacctctgttctccctggcaccaaggagttatgtagcgttgacttgttcttttccatttgaaggtggaaggatgaacataaggtgccagactgggctatttcatcatagacagatggatttgctccattcatgtaaagagttccttttgtagaatatctgaatcctggtatatcctttagatggatgtataatccctatccccacacttttctcccaaacttgtgagttataccattaagtctacaggactgggcagttacgacctggacattagtccagttttctgtattctactacaaaaacttgtttctgttgtttaaaacatgggattatttgtaagttatcactccagaaatgaacgtaactgaatttgctgaggatttaaactaattacctgacatcaaattggttcaaggaagtggggaaaataaagcaaggattgacaactactatttgcttcattctaattttaggccctttaactttaaaggtgaattattccttgttttattcttggagtatttattttatgaatacgtgaattacaataacaaaacactataccgttgtgaaagtgagtgagctacagctacacacaccaacatggataaatctcctataaatctcatcatgtcagcgagcaaagcaagttccagaagaatgcccacagtatgagaccaattatttggtttgaaaatatgcaaagcagcattccatatgtcttaaggacacatacatatgaagggaaaggataaatccatgatgggagtgataatcccctaaaaatagttacttgtgggggaagcagtggagcagaatgcaatctgggaagggtactgagggagttcttatgcgatagtggacagggatggatttatgagtcaagaagagcaactgcacggcgtctggaaggcgtgctggccctgggctctcaggtggaggctgtttgcatgatcagcagataggaaggtaccatggatgcaggagtggtctgaataccagaggaggcaagccaagtgagcaaggggagggagacgagaggtgccaggaaaaccctgtctcatgagaagatgatgatcctagaaggcttagaagagtgtccaccccaggccaggtgcggtggctcacacctgtaatcccagcactttgggaggccgaggggggtggatcatgaggtcaggagctcctggctaacacggtgaaaccccatctctactaaaaatacaaaaacaaaattagccgggcatggtggcgggcacctgtagtcccagctactcggtggctgaggtgggagaatggcatgaagccgggaggtggagcttgcagtgagccaagatcgtgccactgcagtccagcctgggcgacagagtgaggctctgtctccaaaaaaaaaaaaaaaaaaaaaaagagtgtccaccccagtgcccccatccacagggctgctgctgctgagcacccatgcccttgggtgacccactctcctgctcaggggcccagaggatgcttctttcttcttcctgggcactttcccctgagttttggtttaaaagatagaattcccgatgaagccagcttgctgcagtcctgtagccccacatctccatatgcgatcctttgagggaggctgagcatccctgcatctctgaatgggagacatgtttccaccttggctcctgggggcactggggccattttcctggtgttctgagcactctttctgcagaagaagacactctcagatggtagattttgtggatttcagtaagtagagtccttcaggagtctctaggcagaaagcacctgagttgacagcaagaactgagagttctgggtctgcctctagatggctgtttgcctattccagcctcactgtccccatatccagatggaatgacatgagcatatgggcaggacaagccacctttgtccataaggcggggtacacgccaccaagactaagactgaagcctaggcaagacttagagtatttgtggcttcagagaaacatcaaattgagaggaagatcgagtgataggaaaactgaagccagagaagtaagtattttgtatgtagagtatcattttccaatcatcgctggtgtgataaaacagcaaacgtcactgcttattgaaagcaactagacagtatgtttggtgattggattacaagttttccttttagataaggagagatttaatctgtttctggactctttaggagcacccttcccagttttacagttgagggactggagaccctgagaggtgaaggggcctggctgcactcacagtggaagtgatcccactggatctcagatgttgagtttctgacactcaatctagagctcttcttaccacacatgcttcagtctacacagttctccccctctttttttttcatcttctcatctactgcccttattctctctctctctctctctgtaaaacatgtaggggctgtcatagacgacactgtgtgagcggaagttgatgacttcaattgtgacaaatatcaggagctcctctcaaaaattaccttcacaaaagccttttagaaaagccatgttgctgtcacatgtagctataatttgggttgtgctcaaaagacttaaattggttaataccgaagggaggtgtggtttattctgtatttgttgttctagtacttcttgggtttgggggctgctgttatgagaaatggcttctcctagactccagaatgtgcttagagagtgtttttctctttgaattgctaaaaatgttatttcctctctcctggatttttcaaggtgtgcaataagttgtgtagttgctgctctgctgcacagagctttaatataaactgcgtattttcactctgtatgtgtgagtaatctgtgccttctatggctctgatcgtgggtaagcaaaaaacacagtgactgctgaaatatagggatggaaatttctttgtcagtaaagatcctatgaaatcatatactgagcatacgtaaaatatggaattgtctctgcagtattgatcgagcacaaatccactttcgtaaagcaaaaataaaggtcaaacagaaaaggcacatcactggtttttaaaattttttgaataataagtacttgaaattccttaaaaatgacactatatatgatttaacttagatagctagaatagtcaaatacatagaaacagaaagtagaatgcttattgccaggggctccagccctggtgagggaggaatggggagttaagtgtaataggtgctgggttttagagatgttgacaaagttctgaagatagatggtggtgatggttgcacagtagtgtgtgggtatacttgattccaataaactgtacacttaaaatggttaaagtggtaaattttatgtaatgtatatttaattgcaataaaaaggataaataaatgataccatatcctcgtgatttcagatacatctcttacttactgatcattcctcctgagaatgtgttctgtctccatgctgattatgtttcctgttctcttcctttgggtgctgtgttcagcatttttaatttttttaatagttaatgctatgctcacattttcctcccgtgacaaagagtgggaataagcgtggcacatgtgtctctcaccatctgtttgatagctgcacagaagccttaggaaactgagggatagacacgctcccactgagttactcaacactgctgcttccttgtcctctggctgaaggctaaaccctgccttctactgtttacaacaggagtgtccaatctttcggcttccctgggccacacttgaaggaggagaattgtcttgggccacacataaaatacactaacactaacaatagctgatgagctaaaaaagaaaattgcaaaaaaaaaatctcataatattttaagaaagtttacgaatttgtattgggccacattcaaagccatcctgggctgcatacagcctctgggttggacaagcttggtctaacatatagtgttaataggatatttgaggtggagtaagaccaatagatcaggaggtaattgccactgaaaacatagttaattactcacagatcctgtgtcatgccacgtgaggaagcaccagggtgggtcaggagacagacggagcagggaaataaggtcaagagactttattgtggtttctgcaggaaggaatgctgagagagagcaagcccattgaggactgggtagtttgaataattccagtgggctctgggatgtaggggctgcccctagttgtttggtacctggtctggggtgattagggcaggggatagtggtcctgagtgtaagatcccaataagaggagttgttgggtggtgtgggcgtcacctgctgttccattggcctttagccagggcctgagagctgggtcaagataacataatttaaaaaacgatattatacccaccagactatttcttcctggtagaaagcaccacagatccatatggacttggatggatctgtggacagattccatgtttgagaagtagccataacctgcggccttcccctttctacaatgcagactccatcctcagttcaacagaagtttcacaggtatctttacaggtgtttcctgagtcagccgatcaggtgaattgtttgaccccattgccaagaatatttctggctggaggttccgaatacctcaaagagaaagtccctgcttgaaagagtctcctgcccccccaccaccttagaacagttgctggcattgattgctctaccaagagaaaaatgctgatacttgacaaactattgacacacctgggaatggccacataatgttggataatgttaatgccacaggtggaggacgtgggtgtcaggaagaagaagcagtatatgattccacaacagtaatttcattcttcaagaagattgattctattgggaatgatttttcccattaagcatgaaacacagagaattcttggtggatccattcatttagcaagcagttttgtggaagacagcatgtatgactgccaagggtgtggggtgtggtgtccaagtagtgccttcatggctccctcacttataaactgtgtccttgagtaaactgctgaaccctgtggtgccttggtgtcctcaccaataaaatagaggtaaagatacaagctcactggtttcctgtgaggactaaagaacacctgtgaaaagattattaactatgttagagaggagggtgatgatactaattggaaacaaataaggtactaaaacaagtgagacgtgatcttcactctgatggaatccagtgggggaaatgaatataaaaacaggcaattataaaaaaaaaaatggtaagtctgctgatatggagtacactttctaggggcatcaggatagacaaacatagaagaaaaataatatttgatttgagccttaatggataaataaataaataaataacggggagaaagatgattcctagagtagggagtatctcatgcaaatgactgagaagcttgattaagttaatgtttaagaatgtggcaggccaggtatagtggctcatacctgtaatccaagcactttgggaggccgactcaggtggatcacctgtggtcaggagttcaagactagcctggccaaaatggcgaaaccctatctctactaaaaaatacaaaaattagccaggcatggtggctggtgcctgtagttccagctactcaggaggttgaggtaggagaattgcttaggctcaggtggttgaagctgcagttagctgtgttcatgtcactgcactcctgcctgggtgacacagcaagaccaccatctcaaaaacaaaaacaaaaaacaatgtggcatattaaaaattaaaatcacaataaaatcagagggtacattgtgagaagttaatagcaggagataaggttgaaaaaaaaacttgaacccaggtttaaaagaccttggatcatgtgtatatgtgcggttaataaaattcgatagtctagaaagctttaaatgcaatataaagaggactatcttagttgagcaggcacttattaaaattctcagcataaaataacagagtataggacagaaaattatcttggaaatttaataaaaggttatatattagtcagctcctgctttgataatgtagtataacaaacagcccccaaatctcagttgtttatatgaaagcatgtatttcttgctcatggacttgtgcgtcatcttgtggctttgccatgtgtttgtgggttgggtcagatctactttgagtaattctgggactgggctacctgcggggcatgctattctcatggtagactggaggaaggaagatagataggaagacaatcatacaagggcatataaagcctctgggtgggcgtggcatacgttaggaccactggtgttccattggcaaatgcaagtcacctggtcacatccagaggcatggggagatgacgcttactctgcctgtactgaagagaaaggagagaaggaggacttatgaacaatgaatacaatctaccactgatggtcattaatggcctcaaaaatatcacaaagacatgaaagccctgcagtggcttccaaggatcttcttattagaaatgatatgagggatagagcagtttaccacataccacaaacgtgtataccagcatgtgtatactagtttgggaattcgtagttttgagtatggaagtatgggaagtgaaaagaagggagaagtagaagtgttgggtgtggtattgcatacactggctggagacaggaagaaacaacgatcttctaatataaactttaaaatggtcccagagtaaagatataatagtgatcagagatttcactccatgaacatatgaatgtctaatttgtctcttgatatttaacttttaacatgaaatatttcagaaatatagaaaggtacagaaaaaaacatagtggacacccatgtatagtagatgctaacattttaccacatttgattcaagtgaacctatgagtttatttttagtgttgttctttttaattaagaaaatattacagatacacaaatgttgtatattctactattctactctggattgtctttttttccctcagtgtttttgtcatacaaaaaattttaaaacttttaaataagatgactttatcttttccttcttttttttctatttcttgtttaataagttctttcctactcccaggatcatgtgaatgttttctgtattttcttctaatttaaaaagttttgttctgtagctttactttttaaaaacattttttaaagtttccatctggaatttttgatgtgtttggtgtcagagatataattttgtctttttacatatcaatcagtatctaatagcatcatgacctctacagatttgtgtgtcatctgttgtgtgtgtgtgtgtgtgtgtgtgtgtgtgtgtgcatctttttataagtccccatactcttccattgatctgtttgtttctttctgaattaataccacactataattgctatagcattagaggacattctgatatgtggtatgacagctctccctctccccatcttatcacatgcacacacacacacccacacacacacacacggactgagcatcctttgtcttcaaagttgtcatgactactaatgggaatatttaatcaatttatatttaatataatgatgaataggtttgactttaaatctactatcttgctagtggttttctatttgtcccatctgttttttttttcttttttgctcttttctgccttcctttagaactgagtattttttagtattctattttatctcttttttgaattattgttatcccactttgttttattttcctcagtggttgctttagggttcattctaggcatctttaacttgtcatagtttcctttcaaacaatattattccactttatgtgtaagtatatctaatgaataatatatttaaaatttttataatataaagcctcataaatattttatatgtatactgtcactcacacactatatatcactacatatttgtatatttcccccatatatgtatctccctcatatatatgtgtgtgtgtatatatatatatatgagagagataaataattttacaacagcatacttacatttttccctcctgtcatttgtgttacagttgtcatacttttacttccacatatgttgtaaattcagatcaataaggttttaaaaattaaattattgttttctttcctgggataaactctattattctttaccactgtgctagatttttttttttactaattcttaaagcatttttgcatccatattaataaatggaattaactgtaattttgtttcttcatactatctttccccgttttggaatcaaggctgtaccagtctcataaaataactgggaagttttccatcttcttattctccctgggcatcatcctcacctacctgaactactgcagttgcctcagaaccggttttcgccctctcatccttgtcttacagtacacctttgccccaaattcatttcctacaatgcagtgattcttctaaaatacgcatcccttcatgctgctccctggtctagaacacgtcacagttcatggcttattgtcgtagctcagtaattccttgttttctggggtttctctagcatcatacaggctgaaatggtgtcatgtgattccagaggccaaaaggctggtgtggagtcacggcaactttcctaccactacattcccccttcctatgagtttcatcgtaccaatgatggctgttcatagccgactgcatcattttccatgaaattactggtgtggtgtgatctggggtcgcattcaatgggaaagatttagggaatggtcatgagagtggcctcctggatgcagtaacctgacataccctacattttccctgaacttggggtccggggcaggcttttgcaacaggggtatggtatttaaataatcagcataaaacagctgcccattttaaagctgtctcttcatagaggtcaggacagaactctaggtatggcttctactgacagctactccttcaggagatacaaattatatgccgattctgacacttttgaaaaagaaacatatcaaatgcaacttttttttcccatttcagtttatgcttttcactgttctcccttcttctaaaaattgtggtgtttcatctttctgatgctcttctagaaagtgggctaaagcactaaaatataatcattccagtttcatagagccagacttgaggcttatagatgttgtataagtggctcagggacccaaaatatcttctgtggtgacccttgctttaaatctcagggctatgttttcttagactgtctgagcaccagtttcctcatagaatgtggcagattgaggaagattgtatctaaagcaccaacatagtgtctggcaccatgtcgttcagtaaatattatacctgtgaaatacatcaaatagaggcgccactgctgggaagtgaagtcctgcctataattgagtttaacaattccatagaagatttttttgaatactgatgtgcaaggtgactggcctcatgtcagattctgtgagtaaaacaaaggtaattgagcaatggttcccacccttctggcatcactgactgttacgggatctagaaacatacatgatcagacacgtgaacccacggggccaacaccacagcaggagtgaagaaggagctggaaggggaaggtggggattcagtttgcctggcagggcatggtaagacttcagaaaggaagtgacattggaggtacatcttgaaggatgagtgggatttcaacagacagaggctgtagggctgagcacttgaaacagagggaggacatattgcagccaaacctcggtgaactgacttgggtacgcttctgccagaataagaagaggtcttgaattaatagtcaaacctgatatagcttctttgtcactgtgtcttttccttgaaatgaatggaactttttgattttttatccttacttttctcctctctgggttacagtggcaggttgttttatcttcccctgatgaattgaccggtccagagagcatttcagttatcatttatggaacaaggccaaaatatttctttcacacatacagcgcagactaaatcgtctttttctttatcttttttttttcctttaacaacctccagcctatttgtggcatctgaaaaactttgcggcagcattttacagccatttattgtagagtctgttgctttgggctgctgtcagtgctctgacacaaagtttcccatctgattttgagctggtcaccgtgtgctgttgtagtaacagggcctcctggtgcattgaaacacctggtttacttcacacttgatcactggcatgttcaagaacagatagagctttgtctgtcatttgctctttttgggttagcttaagctagggatgttttattttaggtttttttcttaaaatcagagaaaatctagcttcaaaactcaagtgctaaaacaccaaaatagtgttatagaggcacattcctggggcaggggagaggtggccctcgattaaatatatacgagcaagtatttattgaatctcattttaaggacatttgcatttcatgagaagtgagaggtgtggttgctgccctcaagagacttataacagaactagggagaaagatacagccacattagacaaaacagcaagatgtaatcaagtgaaccaaagcagtatcacatgtacacaggagtgtgagcagagagttaaatctatgtatattcactttaggtcatttataaccttgacctccagcaaatgtttaacaatggttataataatatttcttacaattacacataataacccatccgtgcaaatgtctgtgtacttgggccctaaaaatataacatactgattctaggaagaatgcatattcttgtcactgttttcatgttcagaaggaactcaggggtgggccagttctggagtccatgcagctggacagactctggaaggtgaaggacccttgcccaggaagggctgaaatctgtgctgggcagagtgagtgaagggaaggatgttttgattgaccgaagattttctttaattgaacttgaatgggatgacaagaggagaaaaacctggacatttacttcttgaccatggaaagttttgaagtaaacagaacaccataaaacaaaatataatttgggaattgaggttgaaaatcaacaagtaaggttggaaagagttgttgaatgttctacattcacaaataactaggccgggtgtggtggctcatgcctgtaatcccagcactttgggaggctgaggcaggtggaacacttgaggccaggagctagagaccagcctggccaacatggtaaagtcccatctctactaaaaatacaaaaaattacctgggcgtggtggcgtatggctgtaatcccagctactcaggaggctgaggtatgagaatcgcttgaacccagcaggcagaggttgcagtgagccgagatgatgcaagtgcactccagcctgggtgacagagcaagactgtctaaagacaaaacaaaacaaaaaatgaaacaaaacaaaaaaaaccccacaaaaaacaaaaaaaaaagaaaccaaaccaaaagaaaaccaaatagttagatgagatggaaagagtggaggacagatcttaccaggaaatcctcagaacactgactactcagtgtggatttcccaaccagctagctacagtctgcttgtctctcctgagggttttcagactagtttccaaaaagtcaggaaaagggtagaattccaccttccgttccctatttggagctctgggacagtagctgtcacatgatagtatgcgtcagagtcacctggtgggcttgttggaaacacaggctgctgggtccctgagcttctgattcagtagtctcaggtaaggcctgagaatgtgcatttctaagacattcccaggagacacagatgctgctggtctggggaccacattctgagaaccactgcctttgggtgggtgtgggccatgacctccttccaggttctatacattggccccttggctcatcaaaagggtcttggtctatgctttgatctatgcctttccttcaatgtggctgtaagttttacctaattaaaatgctgcatctggtttggatgatctgattaatatggaggatgaaatttatagcaataagtactcagagctttgctcccttcccgatcaaagcctgaagtttgatttctttatacatatattttaataataatcatcattagtgctgaaattagagataaaatgtcccaatcatcccagtgtatttttagtttctaagcatgagcatttgattattgttttctggcgagtctgtcgtgtaatccagtaattgcaataaaagagaaaagtactttttgctaatatggtacaaatagttttgtccacagtgatcaaatacagagattttccattctatgttattttatacccctctctactcccctgcttcccaaaatagacacataatatatacaactagatttattggagcttctgatttatatgagactatataagtgatttcagtgtatctaggatagagattttgttcccagagtaaaagcttctgaagctgtgcaatgcaaataaaattattttatttattatagcattaacttaagatgcagtcttctgaatagtctagcctgtgtttgggatgtaaatttctcttgcaccctgctgcctttcacgtttgctttcagcagggactatagtttaatctttttcttcctccttgccccgcaacaggagatcgctattatcagctgacactgaagctcctaaaaaaatcttagctcagattctctttgtccatctgcaagctagcgcacattccccgttcatggaaaaataccactgcggtggagctttaagtcactgctgttctgcaagaaataaattttatcacaagaagcagtgggtgcagttagaaaaagtcatctagatctaagggaaggcttcaaataattctcctaattggcctacgtggttcactagtagaaaaacctttcgtttttgtccttcaaaaacaaaactgagagagttccctggagacattagtttgctaaatgacttgcccaaggtcacctggtaatatgaccaagtgaagaattatgggtttgtgaaccgttatattcggtataaggccatattcttttgttactttcttaggaagagaatcaatggcttgtttcagaaagctttgcaaggaatcacttactcttctgccatgggaaaaattgtgtatgccagatgcattttgttcatttttaaagagctcctcaatgctattgctgatctcctagggtaagagaaggacagggaggttagacaaggcaactggtagtcttctaatgcctacagtaattaatgataatattcagactagtttcattcatcaaagcgtatacattacagggtttgaaaaataggcgtattttcttagatgcaacaaaatctactctagctgctgcctcagggtgctcattaccacctttctagtctgccatgggtttggttgtggggcagaagtcagccacatacagaacctcaatggcaaggcaatatgggaagtgcagtcctttgctttaagtctctagtgtagagaaaacatgttttgggggtggaatggtagactggagtgggtttgaataaaccaattggcagtaactgctgcagatagttctcaaatgttattgcttccaatggggtgaactaagtcatgcagtgagccaattctcttgcaaatggctggcctgtcttcaaacggctatcagagaaacgtcaatttcagaatatggttagatacagtgtatggggataattagtagatgtcataatgctatgcaatggtattattcttatttagaaacgaaaattgagtaaatttaattttagaacattctaatttcaccaattttgcttgtccataatttccttaaaatttgctcttagatgacagcatggtgcatggcaaatgcaggctttgcaaacaattagaaccaagttcatatctcagggttgcttcttcttagctacctaattggggtatgtcactaaatctcattaattctcactggagaggatgctgatattgaagcgtactgggagcattcggcccatgaagctctgtgcacctttaatgaaatcaggcttgtatggcacactgcagacactgacaaattgtgtggtagttattctgcttctgacccaaatgcaatgatgccatcatcttctgatcccattttttcttgttcactggcacatttactttccaaactgtactttattattatatatttaatcatgcagtgtattgctttaatattgttcataggttatctcctgtttattttgtttctcagagtgactagaatctctctctgtcagaagagagggtgtgacttcttgctgcctttgccttgtatcttatcctgaattctgattctaaccttagtgcttgcatcagttgttatggacctggatcagggccactgtgtatggttgttcaggttgaacagtgaacaagagccccacgtttcatgggataccagtcactttgaatatttattatatttatcatatacataattattaaacatattatatttattatacatattaggtcttgtcctcataaaatcagtacattatggcaactttttaacaaaaagaagtgaagtgtcttaaagaggggcactgcctcttgactggcacagatgcaacgtatgggcaccacagaggctagcagtggccctggataagttgatgatcatagtgggtgatagcataggtttttaaagttgttcacttattcatatgacaattatttgtttttgtgcatattatgtaacaggcagtattctaggtagttggatatacaattattattataaaaataataatcactatatgggaggccgaggtgggcagatcatctgatgtcaggagttcaagatcagtctggccaacatgatgaaaccccatctctactaaaaatacaaaaattagccaggtgtggtggtgcatgcttgtagttccagctactcgggaggctgaggcaggagaatcacttgaacccagcagaatgaggttgcagtgagccaaattcacgccactgcactccagcttgggtgacagagtgagattctgtctcaaaaaaaaaacaaaactcattatcttagtgtcctggggctgccatgataaattactacaaagagaaatgtattttctcacagttttagagggcagaagtctgaaatcgaggtgttgttagagcggtcctagctccaggttgtaggctttgatttgtcagtccttgatatgtacacgttgagtatccctgtctaaatctctgcgatctgaaatgctccaaagtctgaaactttttgaacaccaacatgatgctcaaataaagtgctcattggagcattttaaatctgaaacactttggttgcaagcattttgaatgaaggatgctgagcctgtatacatatcatagcaatctctgtctccattgtgtgttccctccctgtgtatcactgtgtctttgtatctcttcttcttctccttctcctctctcttcctcctcctcctcttcctcctccaccttttctctctctcatttttttttttttgacagagtcatactctcttgcctaggctggagtgcagtggtgcaatcatagctcactgtagcctcaaactcttgggctcaagtgatcctcccacctcagcctcctaaagtgctggggttacagacatgagccatgatgcctggcccatttttcttcttaggtggataccagtcatcagatttagagcctcccctaatccagtatgacctcctcttaatgaatgttatgtgtgaagacctcccttatttccagataaggtcaccctcacacgtactaggagttaggacttcaacaatttaacccattataatcaaagagcctataagactgtagatttacatggagtaaggcaggcaaataaatgagcaataaatatataatatgtgaaaaaatataccatgtgtgagtgattacaagtgctaggaagaaacatcaacctcaagccataggattgcctgtgtggggaggctctattctaggctgtgtggtcagagaaggcctttctgagaaggtgccattggagcagaggcctccgcaaaagcagcagacgaacagtgtggatttatggggagggatgttccaggcagagggagcctcaaggcctttaggccacagtgtgttgggcatctgtgaggagctgctaggaggctcaagtgaaacttggagagaggagggctgggaaagtgagaacagcaaagaaaagggcaacagatcatgtggggttgagtataataggaggttagaaacttggtgattaagatgggaaaccatttcagagtttttaacagaagagtcacgtgatctgactcgtgtttagaagattgttctgttgctgcagtcaagagactatagagagtcaggctgggcacagaagaaactgcaaaagcagttactgctttggagcaggaaaggggtggtgtggttcaggcagcatgggagccaggacactggccctgcagggagtgaatttcaaggttaagtagcctggaagctcagtcctctctcttcaatgatccatgcttctgtcctggttcttcatctatcttcatctatggcacctttgaggtaggtattgagttggaggctttgctcatcctgtgggtgcaggtttggcagcccagaaattatttttaggattaacagctacatgttgttccaggccagacttcctctaacattacatttccctcaaaaattcattggagctcttctctctcttccttttttctgtcccctcccttctcttccttttctttcttgaacaatttagcaatttagtcctaaatatattaggtcaggtagagcaaagtaagcactgctggagaggggagctgcaatgtcacttctgtggggtcccttctgaaagtttggtgtctcactagtgaagaagagaggtacaaataaggaaagggacaaaactagaaggaaccctgtgttatgagagtaaaactggagtattgctgtgaacctaaatacacagatagatacaggaatatcaaggcagtgtgtatatgtacacatgcatttatatgtctactcccagctttgcccactgagagagtctgggagcaatgacatcccaagaacaatgaacacccctagaatccaattcttggcttctaaatactcatttccactaagaggaaccagagttctttggagcaattgctgaatacaagcagggaaattgcagactgagctagagccctgttgatgctggaaaacaaggaaaagatcaaaaaatgggggacatgcaaaaggatcccaaagtcagccagattgggttcccactgccaaacagggcataaatcgagcataaaaataaataataataatattagtggatgataacccagtgaataagatagaaaaatcttgagtccacacatatgcaaataaacacactgaaggtttgatgaggaatggaatttttacatagttccaattacatcccctcagaatacttattaaatacaaagatgaaaagaataactttacagtggagaagcctgacagagagcaccttaatcaaattatcaacgttatcatcagcaatgggacaagtcgaagtccttagccaccacagtaagctacaagagcaccatgacatcagatctgggatttcccaacaaaaatgcaaacctgagtttgatcatgagtaaataccagggaaactcagatggaggtgcattccacaaaataactggcctatggtcttcagaagtgccaaggtcaagacagtcaaggaatggccaggctgtacgcagtggctcatgcctattatcctagcactttgggaggccatggtgggaggattgcttgagcctgagagttcgaaaccagcctgggcaagatagtgagacccccgtctccacaaatttttttttttaattagcctggcgtggtgatgcacacctgtagttcctgctgcttgggaggctgaggtgggaggattgcttgagcctgggatgatgaagttgcagtgagccatgattgtgtcactgcattccagcctgagcaacagagccagatcctgtcttaatttaaaaaataataaaggaatgactaaagaactgttcccaactcaaagcgactaagagacatgggaactgagtgcaatgtgtgattctgaggggcatgggggacccttttgttgttataaaaggcattatcaggacatttggcaacatttcaatgaagcctgaggattcgatggtagtagtctatcattattgatttcctgattttgatggttatattgtggttatttaggaaaataccctcgtttttaggaaatatccactaagatattcaagggtggaggaacagcgggtcaacaactctcaaatggtccaggaaatagaaagttctttgtactatatttgtaacttctctgttgctctgtgattgtttaaaatgaattcgctgaggtcatggctttttttttttttttttttttgagatggagtctcactctgttgcccaggctggagtgtaatggcacgatctcagctcaccgcaacctctgcctcccaggttcaagtgattctcctgcctcagcctcccaagcagctgggaccacagacatgcgttaccacgccgggctaattttgtatttttagtagagatggggtctctccatgttggtcaggctagtcttgaactcctgacctcaggtgatctgcctgccttgacctcccaaagtgctgggattacaggcatgagtcaccatgcccggtcaagggcatggattttgatccatgaatcagtgagagagacgtaagtacaatgcctgatatttttgcctgttcttgaggatagcatccctactattactgaattcactcacatgtgtgagtttggggatcttaaaatatcccagggggtgctttatgcacgagggatatggattaagtccagggtgaatataggtgtttcccagtgataaggcagctgtgtgtgaaagcaaggacaaaaacaaaactaaactaaactaaaaagaaaagtcaggccagtgtgctagatatttacagctgggtgattgtgatggcactgtccttcctaaagctttgtaacagattaagtagattctctaaagccgttcaggttagagggtgccttgcccttattgctccaccgtgctttttggcagacattgtgaccatgtttagtaattatatttggctccctgaaggtaaaacaggagctgcgtacgtattaggggagaaaaaaggaagcacaagaagaaaggaaaaaaaaaattaaggggcttatgttttatatcctcccagtcaatcccatgagtgaataactacattacaaattttgtctcgatgtggtttttaagcctaaagaatctttctttttctttctttgctttctttctttctctttcttttctttcttttctttctttctttctctctctctttctttttcttctctctctctctttctttccctccctcctccctcccttccttccttccctccctcccttccttccttccctccctccttccttctctccttccttccttccttccttcctctttctttctttctttctttctttctttctttctttctctttcttttattatactttaagttctagggtacatgtgcacaacgtgcaggtttgttacatatgtatacatgtgccatgttggtgtgctgcacccattaactcatcatttacattagatatatctcctaatgctatccctccccactccccccaccccacaacaggccccagtgtgtgatgttccccatcctgtgtccaagtgttctcattgttcaattcccacctacgagtgagaacatgcagtgtttggttttctgtccttgtgatagtttgctgagaatgatggtttccagcttcatccatttccctacaaaggacatgtgggctcctgaacttatccttttttatggctgcatagtattccatagtgtatatgtgccacatttgcttaatccagtctatcattgatggatatttgggttggttccaagtctgctattgtgaatagtgccacaataaacatacgtgtgcatgtgtctttatagtagcatgatttataatcctttgggtatatacccagtaatgggatggctgggtcaaatggtatttctagttctagatccttgaggaatcgctacactgtcttccacaatgcttgaactagtttacagtcccaccaacagtgtaaaagtgttcctatttctccacatcctctccagtacctgttgtttcctgactttttaatgatcgccattctaactggtatgagatggtatctcattgcggttttgatttgcatttctctgatggtcagtgatgatgaacattttttcatgtgtctgttggctgcataaatgtcttcttttgagaagtgtctgttcatatcctttgctcactttttgatggggttgtttgactttttcttgtaaatttgtttaagttctttgtagattctggatattagccttttgtcagatgggtagatttttaaacttttctcccattctgtacgttgcctgttcactctgatggtagtttcttttgctgtgtagaagctctttagtttaattagatcccatttgtcaactttggcttttgttgccgttgcttttggtgttttagtcatgaagtccttgcccatgcctgtgtcctgaatggtattgcctaggttttcttctagggtttttatggttttaggtctaacatttaagtctttaattcatcttgaattaatttttgtataaggtgtaaggaaaggatccagtttcagctttctacatatggctagccagtttttccagcaccatttattaaatagggaatcgtttccccatttcttgtttttgtcaggtttgtcaaagatcagatggttgtagatgtgtggtattatttctgagggctctgttctgttccattggtctatatctctgttttgatatcagtaccatgctgttactgtagccttgtagtatcatttgaagtcaagtagtgtgttgcctccagctttgttcttttggcttaggattgtcttggcaatgtgggctcctttttggttccatatgcactttaaagtagttttttccagttctgtgaagaaagtcattggtagcttgatgcggatggcattgaatctataaattaccttgggcagtatggccattttcgcgatattgattcttcctatccatgagcatggaatgttcttccatttgtttgtgtcctcttttattttgttgagcagtgatttgtagttctccttgaagaggtccttcacatcccttgtaagttgtattcctaggtattttattctctttgtagcaattgtgaatgggagttcactcatgatctggctctctgtttgtctgttattggtgtatgggaatgcttgtgatttttgcacattcattttgtatcctaagactttggttaagttgcttatcagcttaagcagattttgggctgagatgatggggttttctaaatataaaatcatgtgatctgtaaaaagggacaatttgacttcctcttttcctagttgaataccctatatttctttctcctgcctgattgccctggccagaaattccaacactatgctgaataggagtggtgagagagggcatccctgccttgtgccagttttcaaagggaatgcttccagtttttgcccattcagtatgatattggctgtgggtttgtcataaatagctctcattattttgagatacatcccatcaatatcaagtttattgagagtttttagcatgaagggctgttgaattttgtcgaaggccttttctgcatctattgagataatcacgtggtttttctctttggttctgtttatatgctggattatgtttattgatttgcacatgttgaaccagctttgcatcccagggatgaagcccacttgatcctagtggacaagctttttgatgtgctgctggattctgtttgccagtattttattgaggatatttttgtcgatgttcatcagggatattagtctaaaattctcttttttttgtcgtgtctctgccaggctttggtatcaggatgatgctggcctcataaaatgagttagggaggattccttctttttctattgattggaatagtttcagaaggaatggtaggtaccagctcctctttgtacgtctcgtagaatttggctgtgaatccgtctggtcctggactttttttgattggtaggctattaattattgcctcaatttcagagcctgttattggtctattcagggattcaacttcttcctggtttagtcttgggaggatgtatgtgtccaggaatgtatccatttcttctagattttctagtttatttgcatagaggtgtttatagtattctctgatggtagtctgtatttctgtgggatcggtggtgatatcccctttatcattttttattgcacctatttgattcttctctcttttcttctttattagtcttgctagcggtctatcaattttgttgatcttttcaaaaaaccagctcttggattcattgattttttgaagggttttttgtctctatctccttcagttcttctctgatcttagttatctcttgccttctgctagcttttgaatgtgtttgctcttgcttctctagttcttttaattgtgatgttacggtgtcaattttagagctttcctgctttctcttgtgggcatgtagtgctataaatttccctctacacactgctttaaatgtgtcccagagattctggtatgttgtgtctttgttgtcattggtttcaaagaacatctttatttctgccttcatttcgttatgtactcagtagtcattcaggggcaggttgttcagtttctatgtagttgagcggttttgagtgagtttcttaatcctgagctctagtttgattgcactgtggtctgagagacagtttgttatgatttctgttcttttacattttctgaggagtgctttacttccaactatgtggtcaattttggaataagtgcgatgtggtgctgagaagaatgtatattctgttgatttggggtggagagttctgtagatgtgtattaggtctgcttggtgtggagctgagtttaagtcctggatatccttgttaactttctgtctggttgatctgtctaatattgacagtggggtgttaaagtctcccattattattgtgtgggaatctaagtctttttgtaggtctctaaggacttgctttatgaatctgggtgctcttgtattgtgtgcatatatatttaggatagttagctcttcttgttgaattgatccctttaccattaagtaatggccttctttgtctcttttgatctttgttggtttaaagtctgttttatcagagactaggattgcaacccctgctttcttttgttttccatttgcttggtagattttcctccatccctttattttgagcctatgtgtgtctctgcatgtgagatgggtctcctgaatatagcacactgatgggtcttgattctttatccaatttgccagtctgtgtcttttaattggagcatttagcccatttacatttaaggttaatattgttatatgtcaatttgatcctgtcattacgatgtttgctggttattttgctcgttggttgatgcagtttcttcctagcctcgatggtctttacaatttggcatgtttttgcagtggctggtactggttgttcctttccatgtttagtgcttccttcaggagctcttttagggcaggcctggtggtgacaaaatctctcagcatttgcttgtctataaagaattttatttctcctttgcttatgtagcttagtttggctggatatgaaattctgggttgaaaattcttttctttaaggatgttgaatattggcccccactcttctggcttgtagagtttctgtcgaacgatccactgttagtctgagaggcttccctttgtgggtaacctgacctttctctctggctgctcttaacatattttccttcatttcagctttggtgaatctgacaattatgtgtcttggagttgctcttcttgaggattatctttgtggcgttctctgtatttcctgcatttgaatgttggcctgccttgctaggttggggatgttctcctggataatatcctgcagagtgttttccaacttggttcctttctccccattactttcaggtacaccaatcagacgtagacttggtcttttcacatagtgccatatttcttggaggtttgtttgtttctttttactccttttcctctaaacttctcttatcgcttcatttcattcattgatcttcaatcactgataccctttcttccacttgatcgaatcagctactgacacttgtgcatgtgtcacatagttctcgtaccatgtttttcatctccataaagtcatttaaggtcttttctatgctgtttattctagttagccattcgtctaatgttttttcaaggtttttagcttctttgcaatgggttcgaacatcctcctttagctcggagaagtttattattaccgatcgtttgaagccttcttctctcaacttgtcaaagtcattctccgtccagctttgttccattgctggcaaggagctgtgttcctttggaggagaagagacactctgatttttagaattttcagcttttctgctctggtttctccccatctttgtggttttatctacttttggtctttgatgatggtgatgtacagatggggttttggtgtggatgtcctttctgtttgtttgttttccttctaacagtcaggaccctcagctgcaggtctgttggagtttgctggaggtccactccagaccctgtttacctgggtatcaccagcagaggctgcagaacagcaaatattgcagaacagcaaatattgctgcctggttcttcctctggaagcttcgtctcagaggggcacctggccatatggggtgtcagtctgcccctactgggaggtgcctcccagttaggctacttggcagtcagggacccacttgaggaggcagtctgtctgttctcagatcttaaactgcatgctgggagaaccaccactctcttcaaagctgtcagacagggacatttaagtctgcagcttgctcttctttctttctttctttctttctttctttctttctttctttctttctttctttctttctttctttttctttccttgcttccttcctttcttcttctttttcttcttctcctcctcctccttctttccttccttccttccttccacccccgtttctgtctttcttcctttctttctgttcttcttttgataggatcttgctgtcacccaagcttgagtgcagtggttccatcttggcttactgcagcctccacctcccaggctcaagtgatcctccctcctcagccacccaagtagctgggaccacaggcacacaccactatgcccagctaattttttacagtattttttatagagatggggtttcactgtgttgcccaggctagtctcaaactcctgagctcaagagatccaccagcctcagcttcccaaaaaagcatcttgtttttactcgcatgctttgtccctctgccaggacagtagctgtaatcccatctttgccatctagcttgcccccagtggctggtggggcacaagttttatttcttgataaggctgtcatattatggctaatgcttataaatgcttcatgttggggtagagtggaaattgacactttcagccatgaagacctcaaattttgggactagctagcctgtattgcaggctttggtgaagccaagggcgtctcctggaagggctgtattcctttccttctgtacatttccttctttccctgattgtagcaggataagggtgaggcagccgaggtgcctgggctgcaccatttaagcaggcgtcactctcagggttgtggaaatgcgggacaggcacctgagggtgatagcctctttacaagtgtcttggggacctctcgtgccttgccctggttctgggcctgcagcctggccagcagtcatctgagtttacttctcattttcatgtcaagaaggaactgcagatgccaatgctctgactctttcctctgatttccccagtatcacagcttcctttgacaagtagtatttccgggttgcagtaggtgaccgtttcctcacatttttgccaacatgcaagaaaccagatttccagccagcaacattattgtccacatgccgagtgtccatctcctctcctcagccatttttccatcttggttctgttacttgtgacattctgtttccgtgtgagagatcctgcatcagttaggaatttcatacagctctaagtgacagaagcccccacccagtggcttcaacaatttgaggatttatttttctcttgcaacaaggaaggagttctggagggagacagcccagggctggcatggcgagtccctgagaccctgggtcctttgatctttccactccgcccatccctagcacagtttgccgccttctgtttacaatacggctgccccacctgtgacattacatctgtgttccaggcagagtgaattcacgaggaaaaggtgcataggagatgaatgtatttctctagtaagtagctttctcagaagctcaaccagtagctcacacttacatcccattggatactgttgtgtcccctggaaaccctgtctgcaagcggagctgaaatctagttgtttttgttttatttttatttatttaattttatctaagtacacggggtaggataaaagcttggctatgatggagagaatatctattgggtggttaactggtcatccttgtcacagctctgctcggcttcttttgcaaaccggtcacaccatgtgggaaggaaaatagccattgaggtagcttttggtggcctccaacttttatcctttgccttattgtccccaccacaggaagaaatatttttcttttagttcctgtctgtcagtctcaggggagactctgactggctcagcttgggtggcacatccgtccccgtgattatacagggacacgagcaaatgcttgtcatctccaacttatcatgtggagggaaagggatggcttcccccagggtgggacagtaatggagaaaaacagcttgcactgtaagtccacgacatttctgtcctacattttgcaagatgtgatcaatatgtattggcaaagacaaaatgagaggctacttttggtggagagcaaatgatagtcaagacaggaatgtgagaattgtgtatactgtcctgtaccagtcaggagcctagcttggctgcagaagagggctaataaagaatgaaataggtgaggcaacaaggagttggtagttgaaaagcatttatgttctttctagtgaggttgttttgtttagattcttctgcctaaagaggaaatgtgttacgctgaccaactatgcgcctccagccatctcttctacttgtttttgacgttatagttgttagcattgggttacttttgacagaaaaccccaaataatatttgtttaaaatatacctgagtttttttttctctcatatgaaagcacagataggcagtccaggattggcttggtgcctcatggtttcaggggattgtgcagcttctatctttctacttcctgtgtggcttcaacttcatggcttatggaaacatcacactctaggtggcaggatgaaagcagggacaaagcataagggacatctgaatgttgtcccttaaggaaggtccccagaagctgcccaatgacactcccactcatgggtctttggccagggccacggctagctgcagaggaggccaacagatgtattctgggaagctcggctcaaaacactatcttgtgggccaggcgcagtggctcacgcctataatcccagcactttgggaggctgaggtgggcggatcacctgaggtttgagaccagcctggccaacatggtgaaaccccgtctctactaaaagtacaaaaaaatagccaggcgtggtggcaggcacctgtaatcgcagctacttgggaggctgaggcaggagaatcgcttgaacctgggaggtggatgttgcagtgagctgagatcacactgttgcactccagcctggacaacaagagtgaaactccatcttagaaaacaaaaacaaaaataaaaacaaaaccccactattatgtggatgcagaagagaagggatattggagggtgtcagcaggctctggccaggctcagtcctctgctcagccttcacagccagagatcatggggataacaaggtcgtggatctcagtggacctgactgacatgaatctgtatttacaggagcccaagggtatttcttgcagggggtggattatacagctgaaagcagctgcttttacaggattacgaagagtagctcttttccacgaaacaatttagaatatacacagtgaaggaagtctcactaacttcctttaagaaagttgaggtgagaaagagtagacagtttgtaaatggaagttacctaactgacttctgcaacttggggggctttgtagcatcaacgggtcagaatttcttagaggcattcttactttttaggtctcaaatctctgtcatttttcccttacggtatttgcacagtgcagcctgccttctgtgacctacagaagcacattgcatttaacctgaggcttatttgatattacactttttttctttccttcaaatatccacaatctaaattgtgttcagaaagttccgaagagctgtaatcccagcactttgggaggccgaggcgggcggatcacgaggtcaggagatcgagaccatcccggctaaagcggtgaaaccccgtctctactaaaaatacaaaaaaattagccgggcgtagtggcgggcgcctgtagtcccagctactcgggaggctgaggcaggagaatggcgtgaacccgggaggcggagcttgcagtgagccgagatcccgccactgcactccagcctgggcgacagagcgagactccgtctcaaaaaaaaaaaaaaaaaaagaaagttccgaagagttgccagggctctatttaatccattgctcttcttagcaatgcaaattctgtgcacaatgagtttattctccttgagaagataaattcagtttggctccagtggctaaactttgttggacaagtttattcctgtgtgacacctacctggccaagcactgtcatttggatgggtctttgggcaggtaagtttctgtgcacctagaaaccttccctgctgggatcttgtcccttgagctcctcctctccagttataaactctgttggcatctttataggatttactttttatgtggattccattgtctccaaaatgccctttcttagtaactagttgggccatctacaccctctttcggggtacgacatagaaatggaaatggaaaatttgtaaggaattatcataatgttaaaatacagataccttgtcattaaaccattaaaaacaaaattttaaaaaccttaagtgttggaaatattaggattccaatgctccttccacttcctgaaggactcatttctctaacatacttgctgaacaatcctcctaccttttccctgcggcattactaaataattcagattgtttgaaaggcattctcttctatcgagatgcaatcaaatttgaggagtgtatttcattctcgccgaatgcattatatcttactttccataaagagaatccaggtatgtgctattgccttatgccttgaataatatgaagcgaagcgatcactcttatatttggggagtgttttagagtcttcagatgctttatgtagtatcaatggctccaaatataataatgtacaattaagaatcacataggcaggcatttttataatgaggaaaagtgaagttaggagagctatgttcactttccaaggctacatagaacgagtgagcgccaggactgacagttccttcctgctctggatcttgtgggctgtctcctccagcacactgcatgctagaggaagccagcgatggggcaggagtggggcgagcatggcagctgaccccaagatgggcagagagcctgcccctcactgttcttccccgccttaaaggacataatctaacctctggacatggactataatctagcctcttctttattacttagggtaaatagtacgtctactgattattaattaaataacattcttcacctgtacatgttatcacactttagttcttagactgctttcatattcaacgtggagatctggaaaggcaacttgactatcttcattttatgattgaagaagctgaggttgagggaggctaaatggcttgtagttacactacaaacactaaaacagcaaaaattagcattggaactagaacatctgatgcatgttcatgactttgtcctcacagtcatatcctcagggtctgtggagtggtgtgtggctgtggccccttagttagaaggccgcagggactgtggtgttttaggttgtgccggctcttcgtcattttcccttttctctcctgtcccttccttccaggctatgagctatatttgtgccagcaagcagtgtttctctctgtttcagctttttcctactttaatttgtttgttttcatctgttaggatcttagagatgagagaaccaagatgatttggaatttcatgtgagattacagaggatagactcagagctgaatggtagcctatcaataacgttcatacatacactctctgacctctttgttggtctccaagaagcctttcagatttagttcctggttgtgggttgtgtttgaggtaggaggaccttgttgatggttgcattccaattaaatgagatggcagccctcacggtgcctgtgtgcatacaacatgtctgtgttagatgtgcatttgcaagtaactggttatagaacattattttggaatacaacacttgtgaaatctgaagatggttttaaactttgtatttcacctgcaattatcttgtagtactctcagttaggagaaaaatatctcttttgctctgaggattcctcagtatttttagtgactctttgcatgcttgcaagggctgtgagaacaagcccagcaggaaggaagagacatggggggaaggaaggaacgtgagggaagtgagaagaaaacaaaggcaaagtttcatacctggaaggcttcgtgcaccagcgcccacctccggaaaccacagttgcaaatattcttttgtgacctaattttggttctaggtttcctttcctctgtatgtgtttgctacattccattccctatgcaatagagtttttctgtaaagaagtttccaagtataaccttccatgaagctcctcaattttaagaatttataattttccagtcctagtgcttaactcatccatcatttgttttccctcatattttacctgtttggttgcactcaaagtcttcgttgatggatgaaacctgatggtttttaagaagcagaaaataccagttttgtcctcactgattgatttttcttgacagatcacgagtataatttataccagctcagtggcactaatcttgttttgttgttgttcttaaaacagctttgacaataagctgctactctgactttgattcttaagtcagcattaatgaaacaccattcatttgtgttatcagctgtaatagtcaaaaacaggtttaagactttaccatgcttgctttcaagttttgggtggatttctttttcctccaatgcttaaaaggtttagtaagtgaatgtcaggtcaaatgggcgtagctgagtttctcccaggcacgctggctttcctgtggatgtttttgtcacagcagtctaagtgtatgtctttctggcccggtcagggaactttgctgtggggatttggtttaaattcatgtttaatctcctaattttatttttgtggctatagtgcctcaccgagtatactgaggctgagactggacagaaagaccttttttctgataagctcttaatctgtatcaggctcagccaaaatgagttctgttagggctgctatttttagctatgtgtaatagctattgtggtctcacaatacacttgtttatacacagaatatggttttatgcacagaattttgtgtattaaaataataggcaaaatgattacaaataatttcaggtgtgccttgatacaaatcagatctgtatacttgtgttttcctgttgacatctgtcatttgcagtcagtggcttaaattaaaattttttggtcttagggaaaatcatgtgagggtttccctgttgcctctctcgggcagagcttctcagccttgacactattgacgttttagaccagacacctctttgctgtagggggtgtcccgcgcatcgtaagaggtttagcagcacccagggctctacgtactagatgctagtgcctcccctcccccactctcagttgtgacaatcaaaaatgtctccagaccttgccagatgtcccttggggatatagggctgccagagttaacaaatgaaaacacagcgtgcctagttaaatttgaatttcagataaaccatacaaattgtttttattgtggtaaaatgcacagaatataagacttaccattttagccatttttaagtggctaaaatttgtaagtggtcagtgtcattaaggacattcacattgttgtgcaaacatcatcaccattcatctccagaactttcttatctttgctagctgaaactctgtccccattaaacactaagtccccatcctcccctctcccagcccctggcaacctccgttctcctttctggctctatgcatttgactcttctgggtatctcatgtaagtagaatcatacagtatttgcccttttgtgtctgtcttatttcacttagtgtaacgtccttaaggtttgtctgtgttgcagcgcatgtcagaacttccttccttcttaaggctgaataacattccactgtgtgaatgaaccacatctccttcatccgttcatccatagatggacatttgggttgcttcccgcatttggctattgtgaacgatgctgctatgaccactggtgcataggaataattttttagtgtaaatatgtcccatgtaattttagtacatacttttatactaaaaaattattcattgtttatctgatgttcaagttaactgggcaagttgtgttttattttattgggtaatgctacctggttgagaaccactgccctaggactgaactgctatttttttttttttttttttgagatggagtcttactctgtcacccaggctggagtgcagtggcgtgatctcggctcactgcagcctccacctcctgggttcaagcgattcccctgcctcagcctcccaagtagctgggactacaggcatgcgccaccaagcctggctaatttttttttttttttgtattttagtagagacggggtttcaccatgtgggccagggtagtctcaatctcctgacctcgtgatctgcccgcctcggcctcccaaagtgctgggattataggcgtgagccactgcacccggccagctggactgctttctttgcttgggcactggctcagggctccaaggaccgtggtcataccttcccatgcaacttacatatgacttccaagacttccagcacagtgaagagcacatggaaaaatgtgggcaccataacatctacataccctaaatgtgtcagtcagcttcaatttgttctcagtttgggaagggtgatagagatactgacccttccttttgacctgcctcttttccattttattctggtaaattcacgcttattacagcacttacagagcaaatcatattatgattataattttatgatatcatacttttatattatgaatatatttataatatgtgaaatgattggattcttcaaaaagtcaacttaaagaaacaagttgggatcctcactggctacttgtgtcctatttcaaattatttctatttgccctttctgctcctctccccagctttattgaggtatgctggacaaataaaaattttaagtatttacagtataaaatgtgatgatttgatgtatgcatatgttgtgtaatgattaccacaatccagctaactaacatgtctatcacctcactagttacctttttttttttttttttttggagtgtgatgagaacccttgagatctactctttgggcagttttcaagtatatgacacattgttattacatagagtcaccatgctctgcaatagatctccagaatttattcatcttgcataactgaaactttttaccctttgatcaccatctgcctttttgctttttctatcactcagagaaagccagttagtggataatttctacatgattgaggttaatagaatgcggccacctaaaactgtccctgaggcttgggaatttgggtgaatcctgattctgccatgcactttgggcaagtcacataccttcagtctcagtttcctcatccgtgactaaagaatagcatgaatgccttctccatggaatcaccatgagaggtaaaggaaatattgcacttacagctcctgctatgaaatatctagcatctgacagacatgcaccttgtcttagatgtcgagctgcagagcagttttcatggcagaaagagagcaatagttgctaacacgtatgaactgcttactgtgttccaggtactagtctccagtttttacttgtattgttgcatttaatcctcacactgagcccacgaagcttgtcctaacattattccctttcacagatgaagaatgtgaggcacagataaggtacattcatccaagggggtatgtctggcaagcagcagagcagggcttggcattgggacatcctgattccagtgggaatagttgtcctaaccacttggctagatggctgcctgtggggtggtgcttctggatggaacacagggtgcacagtgatgcatttgggaatcactgaggcaggagagtgaccccacccagccctccaggccagccaggataaccctggagggctggagggggacacgtcctggtgagtgcaccctccctctgggttccaggtgagatacccttccagctggccttttgagcccagctcccccaggaaggaaggatgctctccagcaggcgctcctcagagcaccttctgtgttttcacctcacttagaaaattcaacctctaaacatcattgagtggcactgagaactaaagccacaaactcccaacttgagaaaatgcaatatttatacatttaaaacagccaaaatggttttaacatacctatactgattcaaaaaagaagtctgagccaggcgtggtggctcacgcctgcaatcccagcactgtgggaggccgaggcgggcagatcatgaggtcaggacattaagaccatcctggctaacatggtgaaaccccgtctctactaaaaacacacacacaaaaaaaaagttagctgggtgtggtggcatgcgtctgtaatcccagctactctggaggctgaggcaggagaatcgtttgaactggggaggcagaggttgcagtgagtcaagatcacgccactgcactccagcctacgcaacagagcaagactctgtctcaaaaacaaaacaaaaaaaaccaaaaaaaaaaacaaaaagaaaaagaaatccgttttcgctgagccctcctggcaggtagtaaaatcttggacttgagctccctggggccctgtccagttgccctcagtgccctcccttccagcttacccatttaccaggtgttcgaggctgctgccagtttaaattttgtttcaaaaactggccttctctttctttttattctgcaacattttgccttggggcctagaaaggaatccttagtcactgattgccgtaggcggatattacctcacccagtatgggcttccacgctaaagacctctcacaaacacttgcacactttcagactcaccctgcacaaggcacgctgacgctgtttcctagggcttattcccaagaacacgtctctgctgagacttggtttttgttaggatgtgtgtgattccatgtgttccatcatgcagaggagatgctgaaagttagcgctgtggctttcaagatcctcctgtggcgcctttgtatatggcatagaatggtgccaactggagtagcctgagaaccagaaacaagaattctgcttctgaacagcttcgtttttgggccagagaattgtttccaccagaggaggcgtgatgggagcttaggggctatgtgctcggtttctgaagttgtacaacggagcattcatttgcattcatttgacaagtcctgctgtgttcctttacttgttctcttctgtattatgggcttaagggtcgcttatttcaacatcgctatattttccctgaaagctcagtaatgattgaatcacagaatttaaagagcttgtcgtataaatacatctaaagtgaaaaagatgaactttttccccagtgaatacaggcaaccatcaatcaaaggaatgcatcctggaaaagaaaggcacagggtaaagcctgcctcctttgcgggtcccatctgttcttgggaggacagtccccatgtattgctcctgggccctttgtggccgagcacgaacagctgtacatacaaaggaggctgtgtgtttgttcatgatgttggaaccggaagtggaaggggctttcttgtcaaagaaggcacatatgagtgccatagttacgggacaaaaatatttctcctggaaaatctattgaagcctttgtgcgatgttcagcagagtgtgttgggggtgggtgtgaatgtatctgtgtgggtgaaatgaggataatgtggtcatgtgaacaattcaaggcaagaaaagatccggtgatactgagaatcctgattctcctttagagataggagttctctggctattctgaagagtgaagttactgcccatgatgttgcaacatatggacatttgcaacaattttttttttttttttgagatggagtctcactctgtcgcccaggctggagtgcagtggcatgatctctgctcactgcaacctccacctcccgggttcacgccattctcctgcctcagcctcctgagtagctgggattacaggcgcctgccaccatgcctggctaattttttgtatttttagtagagacggggtttcaccatgttagccaggctggtctcgatctcctgacctcgtgatctgcctgccttggcctcccaaagtgctgggattacaggcgtgagtcactgcgcccggcctttttttttttttttttaaatgattcttttgttccagttattgacctagcaccagcatttgtcttatggataaggtgagggcaaaattgcactgggtgtggcaaggtgattctgcacttagaggttcgtgtttatggtgctactgagggactgaagaattcatctggaaacttttggctgctcccctatcctcttcttgctaaatcagaatggcatacagttaaaaatacgggccccaacccgaacacaggatttcaaggcttgctcactgcttgcatgatcttagaaagtcacatctgactccaaaccttcgtttcttcatctgaaaaacggtgacgatgatgacagaactaccacctgcatggtgatgctgtgcactcaggaaggttttagaaccactagagtggactggggctggaatggcttctgtcacagaattcagagttcccttgtactgcagagagtcaagtgcagctgaatggctgctaccagggatattacccagatgttcacaggtcatgaaagtgtgggacaagatgacctcagagcttcccctccactggtgacaacacatgtaacatgcctcctattaagcctgtaatggggtaaattgtatccccaccaatgataagtccaaatcctaacccctgatacctgtgaatgtgaccattcttggattataagatctttgcagatttatggatcttgagataagatcatccttgatttaggatgggccctgaaatccaatgattagtattttttatgagaaaggagtgggagatatgagacacagacacacagaggggaatgacatatgaagatggaggcggagacagtagtgaggcatctcaagccaaggcatgctacgggttgctgacaaccaccagaagctgggagagaggcacggaaaagattctccctcagagcctcagaaggaacccactggactaacaccttgactttggatttctggctgctgggacaatgacggagtaagtttctgtagttttaagccacccagttttcgatactttgtcatagcagcattaggcaactaattccatatctcacccataataaacactcagtgctagcaattggctgccactgtggtgattatcagcatggaactatgtgttcctgaagagaattagttattccatttctatgaatattttcaacccaagattgttgctctcagttaacgtactgaaaatgaacttggtgaaaaagtaaaagctcttctacatatcccatttgtggatagacttaagagaacagaaagcttattatggaataagcaaattaatacctttgggatcaatagagtgtctacagttcaaaaccctatcaaaagtgggtttacgtaaaaaaaactagtgtgttatccatgtgtaatattttgtataatatacaaaattctggaaaggaagactcacaatgccagatcaagtattgcaacgtcagttatggcaggaacaaaggctcttcccagaagcctgtcttcattgtgcattctttcaccagaacaacttgctgtacttaaggcacaggacatttggatctagagatgtagctgttgtgactcaccatttctataaacttggtgactggtcccaggctgtcatatctgtacctgatccactacagggatgaattgacattttcagtggctactttgagtccagatattaatagatcagcctgaaagggaggatgaggcagtaatagcacttttacaagcaatagaagacaagctcagggaacaaaagagaagggaagctccttgaatttaaaggcaagggcagagatttattcctccactaaatctaaggactaaaagcttaggtggagagagggctcaaatgtgaattcacttctcatgctccctttgtgacctcctttaaggaaggccagatttgaggaatgagattttcccaaggggaggaagcattgtcttcatcacttcatgtatttttctcagaaggctattggcctcctggaatttttacttagaattccagatagtccaatgatgctttctaggtaccgtggctttcactgtggtgagagttttggctgcagtgcttttctgtaacccactcacaaagcctttggggatggtgatagtatagggattgtccttccaactagttgctctccaactagaaaggcgaatccctttttctttgagtcacagaggatggagaggctcagcattctcattccctgtttgggtttccacccctgtggccatgcaatttccatttatagccatgtattggcttacaagcctaacaccaatcctgacccaaagcatgaggcactctcacacatttctaggttaagaacactaaaaagcaggatcatcaggttattttttgttatttgtagatttctgcatagcctgatgcttcaacttcccaagacctcatttcttcccagagtagctggagtagctggacctttatcatgttctggtatcaaattctgccttggtaatgtgtacaatgcttcaagaattgcggactccatattactctcctgtgtcatgtagttctctctttgtgaaagccatccttccctgaaacccctcatccacctgcctaccttgccaacattccctgctcctgggttgcccttcattgtgttctatttatgggtaaccatgctttgccaggaaccatgccaagtacttggaatacgaaggaagtcattgatggagaggacacacaagtaagtaaagggccctgataaaatgcgacgagagctaggcacgtggatttttatgcaacaaaggagataggcaaggagcccacgaactagtttccaaatgctggacccccttgatcaggaccttttcggagcaggctcaagtgtctcccaacacctatacctggctggaccccttgccattgtctcaccacaagttgatgctatagttccagagggctgccccgccaggccactctgtcttttgcaattccagggtgggatgtgcattgtctacttggacctaggaactcccttcagcagttctcctgtggacctgtatccaagccaccctacaaagtgagcatgcactctgatttaggaaacttttcttgagagatttattctatagtctccctaacatcccattctggtgtttattccattaatttagagcaaacacccattcagtgaagggccctgaaaggcatagaaaaggacaaagtatcagacttgatttctgctctcagctattaaaactggagaggcaaggcacatagaaagatagggatgacatgatatttaaacaaatgttctacacagtgtttctcaatataatgttcttgtcctgttggggggcttttcagtaagcagtgtcagtgaaagggcagtgacagcaggagatgatttttggttattttctgcataggcatcctcagtatggaaggctgtgcccacctacgtttgaaatgtgcaagcttgattcttctctcttttcttctttattagtctagctagcggtctatctattttgttaatcttttcaaaaaaccagctcctggactcattgatttttttgaagggtttttcgtgtctcttatctccttcagttctgctctgatcttatttacttctcgtcctctgctaacttttgaatttatttgctcttgcttctctagtcctttttattttgatgttagggtgtcgatttgagatctttcccactttgtcctgtgggcatttagtgctataaatttccttctaaacactgcttcagctgtgtcccagggattctacaatgttgtgactttgttctcattggtttcaaagaacttatttattcctgccttaattttgttatttacccagtaatcatacaggaccaggttgttcagtttccatgtagttgtgcggttttgagtgagtttcttaatcctgagttctaatttgattgcactgtggtctgagagacagtttgttatgatttccgttcttttgcatttgctgaggagtgttttacttccaattatgtggtcaattttagaataagtgcgatgtggtgctgagaagaatgtatattctgtggatttggggtggagagttctgtagatgtctattgcgtctgcttggtccagagctgagttgaagtcctgaatatccttgttaattttctgtcttgttgatctgtctaatattgacggtgggatgttaaaatctcccactattgttgtgtgggagcctaagtctctttgtaggtctctaagaacttgctttatgaatctgggtgctcctgtattgggtgcagatatatttaggatagttagctcttcatggaggcaacctcaagtagcattattgttcttttcatccttcctctcctactcacctcccccactcctgacaaaatatggaaatcctgtccctgagtagtcttgttcacaatacacaatctcacagccaaaggaatgtatttttaaccctgagacgccgaaaacggcttgaatcattcatgctgtcgtctattagtctgccgctgtgctgttatttttcccaggcttaatgagccctcatggcactgcgctgcctcagagcacggccgcagcttcaagcacagacaagcctgctctttaaatatgcaagtcatcagcctttcttggaaaatgctatggggaaggtgctctggacaagcaaacagatgatttttgcagactgttctgtagttaatttgggtcatgaagcccactgtggctcaaggagtttaggggacagaaaaggggcttttgaaggattaacaaccagataggaagaaagaaacaaatgaagggtaatcctggttttcttttgagactgacaagaaaaagttgtttgaaaggaggacactccaccattgttgttgttgaaggagagctgtacttctgatgtcccccaggctttgtagtagttaaggggtgagggattgcaggagctgctcaaacctggctgctaatatgacactaggagcctgggtgacacaggggccatggtgccagctgcaggtagcgtgggattgaccctgttagccctggacatcaagcctggagtgagagatggcccgaaaacccctgggacctgatacaagcaagggctttgggatcaaccaggctctcactaacaggcatcactcaaaaagaaaagcatttatttaatagagagtttcagaaaatgttccccttattatttttctttgatttttgaattggaaggcgcttagagatcctgtcctttaacccttgcgttgtgcagatgagagatgtgaggtcagggaagtttagtgggctcagggacgcacacggagttcacagggtagcccgatgcagtgggagggtcgatgggcttctgcctcagagttcttttcaccctaacatttcctgtgcatttgtttacgtgtgccagggatcgctctaagtgctttgtacacattaaacttatctaatctttaccctaactgtgagaggtggctgccatcatttttatttaatttcactttgcattaaatgatgttggcacagtgatgttaagtctgttgcccacagtctcctgcctggaagtgacagtcaggattcaagccaggcagtgggagcctctggagcagccctccaaacctctaccccatatggctcacatagcctctaaaaagggttttgtgactgatctgagatcctaaccattatctatgacttcatattcctgagcagggggcagctggggaagcatttcaagatactcaaggacaaagcacccatcaacatagatgggtgcaaactcaatgctatctagttcgctgcagctgtttggctaaaggaaaacagaatacctgcagagctgatggcttggagactagatgtacaagattacaagccagatgcaagtctagtttctggggtccatctgtgagcagaggtgtgggtggaggcccagaagccaggctaccatttgggattgactcttagctccttacatgcacttaagcagccattcatgaccttttctgcagctcaactgatacactcaaggctgggcatgtccttctgttctagtcattctgcttttggtccacttctatatgtttgttaccaaactagacattgtcttcaagacccactctggccaagtcctggggtcatgtttagtcctggaaggacctccaggagatggaggtagttcttagttgaccagaggggagcaggaccacctgtgctttaaggtcatcctgatttcctggtggtcgttaatacgaaagaagctacaccaggcttgacttctctgagtcagtggtgttcagagcccttgactcaccctggacctgggcttggcaggaatttctctaaccttaggtggatgtatgggtgagtctgcacagcaacttactgttctggtgcatttgtgttggcatgcccatgtaccgggagatgccctagggacttacttatgacatactgacctagagagggtttgcgtataaaattttaacttgactcactggttcctggcagggtcaataaatatttgtggactcactgagtgaatgagtgagtgaatgaatgaaccagtctgctaagaagtgtgagcacagaatatgtgtgctgttctgacacatgatgaccctatcatcctttgaggacctaccatatagctcagttttgacactgcttgtgatttttttttttttttgtctttgagacagggtctcactctatcacccaggctggagtggagtggcatagtcataactcactgcagccttaaactctttgactcaagtggtcctcctgcctcagcttcctgagtacttgggaccagaggcgtgtgctaccatgccagataattaaaaaaaattttttttttatagacaaggtctcactgtgttgcccagggtggtcttgaactcctgacctcaagcaatcctcctgtcttggcctctgaaagtgctggttttacaagtgtgagccaccaacccctggtcccacctgtgatatttttcaccagctcatggccgtggggagcccgactatttgcatacgtgttttttgctcagtactgacacctggtggcagtgtcccaaattgcaagcacagtctctagcattaactcagtgtcaggactttggtgtggcggaccataagaatgggagcctctggagttatgcagagagaagtagccctaccagggaagatgtaatcttgcaaaataacctacctaatgacaatgagtctcttgtcttttcttagggctgcataatcagcaccacctgatttagtggtaagaggaaaggtgctagtgggaaatgccattatttaaaaatacctggagactactgatctagtttaagaccaatatttgtcccacatttgatattagaaccaatagaatgatagaagtaatagctatggtactattaatagctcctattgaggacctgtgaacacactgctggaccctgtatatttagtatttctaatcctcatgataacctaacacatagggattattatttccattttacaaattaggaaatggagctttggtttagtaacatgcctgagttcatggtaggggctggatttgaatctcaatttgcttgacctcaaaggctatgctctttcactctgcttcaagggtactgtgttactccaggggtgccattcacattctagtcagtgtacatggcatttctggggttgtgtgacttgtagccatcctctttccatcattcccactgcctctccaggagccaatcatttatgtctcttctaagctcagtgggtgactgaggctgtgaagacatttaaaattgaataatgtatcctgtagtagatgcattgactatttctctagagttggcatcctaaaattcaaaatttttggtctggcagcctgtgaaaaaaatcgtattttgcctctaattctcaaccctggagagcgccaattagttgtgaagttactttcaaactgaagcccaatttatactcctaataaaaacatccaatgtaatcatatgtgaaatggaggctaatggccctataccacccgagcatcaccatagtgatggtgttgaggataaaaatgatgacaatgacaacagcagcgatgataatagttaaccattgtcgagtacccattatttccttgactccttatagacactctgtgagggaagtaatagtattgtcccaattttcagaggaggaaatgaggtgtagagatgctagttatcttacccaagctcagttgactgtgctggtaagttgtgaagttaacctaggttagcctgagttcacaggctatgctagattaacttcagctagccttgcttttaaccacctacactgacagcctttcaattgtaagaggagctttgggtttttgctttgaaagtagaaacaagtatctagtgataataatatgcctaataattatcctgcacaaaataaataatccagccacttatcaccacctctaaggcaccttctcatcctgtcgttttaaggttttgttcttttggttctgtccccagccaggttttcttttccctccacatgcctggtgtggtgtgagtaaagcatctgccattttgattatggcacacttgctacctcttcttaaaacattcgttctcatccctagtattgtgacattctatcatatctctgatttttaaaaggacattggtgaatttccagaaaaaaaattttccaacctccttttaacctggcatcttttaaaattaaatatgtctctccaaacatattggtggggaagagttggtgtcatgagttaagtaggggtataattacaacccgaaagtttgggggcaaaatggagcagttccctcattggtcagagttctgtcattggcccagcctcctgtcctccacaaatctgagtcagggtgagacaccaagagcctcccttgagaccggcactacttggaaacatgactggctatttctgctgcaggattcctggtccgggctccagcaaaattattgttgtgaacataggccttgaagaggaggctgaagccgagaagccaatattcactcaccttttcaaccttcgacaaggctgaaatttctcccatgatatcactggaaggaagggcagagggagtcaacaatgaagaaagtgggaagagggagggagaatccaggcaggaaaaggggggtgaccgtgcagcaatagctgtgagggcttcccagcagcgttagacacaccctttgcttcagggtcgccatctctgtctgcatctccttcctctccttttgacccagcgtccacttctactttggttagttaaatattgaaataaactcctttacaatgtgtggaagtctcagctcctcagcattgtatcttatgggaatagttactcttcagcctccgtgtgtatccagggcgtggaggccatgctgtggggactgtgtgttaatgtccttgtagctcaagaacagctgctcttaaatggtccgtgctgcggtttagtggacacaacatagcacagataagtgaagaaacaagtcatttttaagtgacgcaaatcacagtagaaatatgcaacttatggaagtgaaatccttttagtattaatttttcttaaatagcaatcctttgtagttgtaagatatgtaacgtatatattgttacctagttggatgaaaaacagctaaatcaatgattgttaggtttcttaggtgaatgatctgtttaataaaattattggaaatgcatattctttattttgatcaggtggacaaattgttccatttcatagttacaccctgacttccatttctgaagagataacccaaaggttactggtggtgatggagggcatcccagtcctcccctcatttgaggggcagagcttaattctggattgtgcttcctccactggagttgatttagagagcggtttggtgaaaaccgaagaaagggtttatctcagagcctcctgctcttgtttgaacacgctgcagggattaacttgtggttgggactgagccagagagataaatgacatagcccttgtgtgctcacattcagagggagctcttgccaaatgggacaacgaaggattgtgttaaagagatttctgaacatcttaatacagcaggatgatacagtctgctctctggactttctggggagcactgagccaagcctcagaggactgtggcatgtcgtgagtgtttaatatgcaagtgacatctaacaggggaaaacaagacatttggaaacaccattgggtggggtgggtcccccgcatttttcagcacggattttttccaacaatctcatatatacaaaggaagtaaattcacaaaagattgggtgttgggggcgtggggcgtggtgaggaaggaggaaagcactaaattttattagagtgcttctcaaaattgagagactgaaatttccaaagcaggaaagattacactgaaagttgggaatgtcttacaaatgtacatattgtcctctacgcgtgatataaaattgttcagcaatagatatttcaggaaacgtaatcagtgtaaaccctttgatgaggaaagccatgcaaacatttttaaacaattgcatccttatgtaatcctggtgttaaggggtgggcttaaaaagccaattcggtgagtagagggactcgtaccttatacagggtttggcgtctaaagctaacacctaaggcataaattaagcacatttacaattgcccttgaaaattccttaagttgcccataaagtacacaaggttttgtgtgtttgggtcttttcagtaatataaatgtggacgtgcacaatggacaacacttaatagaacacacatgcaaaatagaattttccagaatttttattgcacaaaacattcacatagagtgcacctggttgaacgtatggaagttacatgcgcatgtggtatgactgcagttgtggatagacctttttactgcgtcctcctctctagcacctaagtggttcctgtattcttcccaacgtaattaaactgcaggaggaaactggccattccaggtttagacagctgcccctttgaaagagaggaaagtgtgtccatgctggggagaggcagctgcaggaaacgtcctgagcttgtgaaagtctgaccccaggaaccaccctgagctgacctcccaacattctggttcctactcctcaggctcagaccctggttggttcacggccctggggtcatctacacctctttggccttgaccttggacattcggcccagccaccttccactccacttttttttctcatagattcaccgttttcatcctgcccatattctcccagcatccagccaatacctagttttcccagcatctagccccagttcctagttctgctgcccctgctctaggctggtcagttatatagcgttgcttccctgcaggtgaggtggcatgtgacagggtagggtaggtctgacacccctgcactctctctacccacaccgtgaaaaatagtgagacaacagcattgcattcttcattttgaaagaggtttgaatgtttttatttgtggaaggtagatgtcatgaagagttgcataattaaactagtacagaggaaaaactggcagagaagtgagttgcagggctaggtttacatacaggatgacaaacctgtctctaaagatcccgggaactgttgtcacatggtgacagcttatgatggtggctgaggacactgctctttacctttgtgtctcttgtctcgtctctgaatctcaatacctgtaattaagaaggagcccataggagttttatccatcttattttcagatatttaagcagaataaatatattttcacaatcctttgaaactctcttccttcttaaaccttaatgagattccaaggtagcaacaaaggcctttctgatattacctgtacaatcaaaaactgagcttgaacttcctataatttcttctttttggtcaaaggagtcaccctccaactgacatatttataacatgtccctgtgataacgagaaactactcacttatctctgagtctcatgacagaaagagtatcagaaaaaaagatactacaatccttcaaacacacagcagtgtgagacaaaaattacactctaatctgcagttgaacaggttctgtcttccattaaacctgtatccccattttattatatagttgagccagttatatatgactcactgggaaagtgcattttatgatcttgttagaagaaatggtttctctgggatccttttaagccaataattttatacctagctcctcctaaatatctaggacattaacttattagccattccggtgtcaagcctaatgctttttaaatacttaaaacaaataccaggaaactgtgggggttggagaatagattttccataggcatttagtgctttcagagatcagggggatcgatctcaggggatttagtaggaaaagacttgattctctgcttcctctgcacacagagctttcattttatgcaacaggagggacagcatgcatgtgggataaagccaggctgattatttcaaaaccaggctcacatctatttgactgacaaggtcctggcccccggccagggttacagcaccggaacatggtctcttctctgcggctctgctggctgggcctgtgtggaggcgggtggatggggggatgtccaggctgcagctgacagggcacttggagatctcagaaggcagtggaggcttggggactgaaggggacccggcttcgatggggtggggaagcacagcagcttggtaggaaatgacctgaaagagggattcctaaacatgcatgtatgtttgcgtgtgtgcatgaaagcagctgtagatcacaactaatcttttttttttttaattgcaaatcccactcaattcttcaagctttcttggcagcatctgatccagttgatggctttggaaacacttcattcttcattggcttctatagacatctcctcccgggggttcttggcttccctgaccactccatctctgttctctttactggtccttccttctcatccgtcattttaaggttttgttcttttggttctgtccccagctgggttttcttttccctccacatgcctgatgtggtaggcagaataatgaccctcccaaggatgtccatgcccttatccccagaacccggtgaagatggatgttacaaggctaaagggattttgcagaagtgaggaaggttatggatcccaaggtggggagagcatcctggtttatccagatgggcccaatctaatcacatgagcccgtacaagtggaagactttctcaggctgggcacaggaggagccatgaggcagagggagtgacagtgaggtttgaagtgtgagaagtgctggatgacatgccactgcaggctttggaggtgaaggggggcccatgaggcagggcaagtgggcagcctctgaagctgacagcacacaagaagaggaggacctcagcctagggccacaggaaactggattctgccaacaacctgaccaagttcagaaatgtcttgaatcccagagcctccagaagagaacatagccctgcgttcaccatggtttcaacctgtgagactgagcagagagccagccgagtccttctgtgttggacctctgacctacagaaccatgaaaccaatcattcgtgttgttttaatctgctaaatgtgtggcaatgcagtaccacagcgataaaaccaatccacccaccaccaatggtcttatgattctaatagcttcaattaatcctataaactgacagccggtccctattccccattctgctgaatcccaaagcctcacgactttcttctgttaggcaactctgcttggctgtgttaaaaacacatctaaccctacatgttagaaactctgccagctgacaaaaccagaaaccttgagtcagtctggattctttcctctctgttttattcattgtgtaatctcaactccatcaggtcttggttgaaatgtcagcatctcaaatgggtcgcctccgaccacccaatttaagatgacagcccccctcctacacgtaatcgtcctttatgcttatcagcatcagtgtattgtatgtttacttaccactttgcttattattagctgtcttccctcttggaatgtcagcacatatgtgttttattgtattaattctatttaataagtagtaatagagtggtttccaagtgtcaggaactgctctaagcatttttacaaatatccacttatttaatgctgttttttcaccgtcatagctctagctgttagaatagtgcctggcatgtagtagttgctcaataagtagttgttgagcgaataaatgaataaatgaatgactccagcctaacacgaagtcctgtcaattctatttcctaaatacctttcctaacaacccacctttctccatctgtaatgaactaagaaagtggccgtatcattctcctttgtagggcccttgaatggcttccctttgtttgtgggagaaaatccacactcctgcagggattcacacacgtttcttgtcatgccctcagttttctgcctccatctttatttctcaaaactcccctctcatcctctcttgccttccttacatgctaatcttcaatcagcccggacattcagtttccctaatatgtcccatcctccctcttcttccaagcccctgagtatgagctccttaccattggcattccttcctactacctgccctgttctctgcttattctatttttttttttgagatggagtcttgctctgtcacctaggctggagtgcagtggcgcgatctcagctcaccgcaacctccgcctcccaggttcaagcaattctcctgcctcagcctcccaagtagctggaatcacaggcacgtgccactgtgcctggctaatttttgtatttttagtagagatggggtttcaccatgttggccaggctggtctcaaactcatgacctcaggtgatccacccacttcagccttccaatgtgctgggattacaggtatgggccaccatgcctgggtttctccgcttattcttaatattttaactcagctgtttccctcctccatgacaggacacctccctcacctccacctccactgagaaagtgcctttcctggtgctcactgctattctatcttgtcctctgtccttcccctctctctgtgtgtggtaaagactgctttccctgtgcaattctctcaccagtttgcacggttcttgaggccatgagctggagagtacgatccacttgggcatcaagtgcaccagctggcacctagcagggactcagcacatacctgccgagtgagtgaattggtttcccatggcttggtgagccccggccaggcactctcccgagccaagggggacacttgttctgccagtgttgatttgcaggcgcaattatatgtgtaaatgcattttcactgttctgccttaggacccaatttttgaaaattagattttaaatgtcgtattctcctcacttacatcttatgcttcccgacattcagcacataatttaaaatgaaaggcatagaaaattggactcatttagtttactccacttgaaatccatgtgagtctatttttaaattctcctagaccctgtgctcttttagggtgtatttgagaggaaggaagggggtgggggagaaaggaaagaagacactcattgtaagctgttagagatgctgcgtgttattgcactttgttttaatacatgcagttttcacattagcattaccccaaatacaatttctaaagccaaagactgaaattgagactctgccttcaacatttgctgctccatgacgttcttgattgcaatgagaggctggctgtggccagcttgcgggtgcatcacagcagggagctttaacattctttcctctgctttccagctgacatgttcctccggctctgccacacccatcagatggcaggtggggagcagattaagacatgggcattcgcagggtgcacagaacgctggcttacaaacacctcctctcataggcatgcaggtgaacagatgggtgggtgggaggttccccttcacccacagtcctgaatctgagttcttgggttaggatttggtatggcagccttcacattgcacagatatccctacattgggctgctctgcatgcctgcaatgagagtttttgggcttcttgcaggcaggaggtgctgagtattcacaccaaagcttggacatataagacaccagtgacccctattctgctaattcataacactcagccggctcccacattcccactgcctgtgcccatccccgagaggctttcctaccttcctttttctgctttataaagcaacagtgagattccaggagcaaggccagcaaagcgaggtaggagagctcatagataatccaacaaacgtgtatggagagcccaccatggggtgctctccccatgaaacttcaattttttttttttttttagatggagtcttgctctgtcaccaggctggagtgcagtggcgcaatctcagctcactgcaacctctgcctcctgggttcaagcgattctcctgcctcagcctcccgagtagctgggactacaggtgcacgccaccatgcccagctaatttttgtatttttagtagagatggggtttcaccatgttggccaggatggtctcgatctcttgacctcgtgatctgcctgcctcagcctcccaaagtgctgggattacaggcgtgagccaccgcgcctggtctgaaactcgaattctaatgggaaagacaaaaataaaaaacaaaaaatatataattgttaaaaggactgcagaggcaccagtaaaggatcagagagcaaattatcagggtggcagccagccaagaactgtaggggaaagtgccctcaaaggcgggaacatttaagacaaggcttaaaggataagcaagctgcccccacagggagggagcagagcgtgccagacagaggatggggaaagagctcctgcagtggagatgagaaaaccagacgtgtgatctgggggccgggggacgaggtaaccaggggatgagggaaagagggaaaaaacaagcaaggctgaccatgccccacctgaaggttttgggaaggatttggattttattcaagatccagggaaagccagtgcaggtatcaagcaggtttttctgggatctacttccaggaagaaggacaagtataaaaaggtgcaggggaggtgtaggctcctcccctaagagggaacctgctgggtggccctgtagaagacagcagtcatagtttccatcagagctgtgcattcaaccttctctatttcccagctgtgctgcatggaaacagaaaatggcatggccaggccaggggcagtggctcccgcctgtaatcccagcactttgggaggccaaggcgggcagatttacttgaggtcaagagtttgagaccaccgtggctaatatggtgaaaccccgtctctactaaaaatacaaaaattagcctggcgtggtgtcacatgcctgtagtcccagctactcagaaggcccatgcaggagaattgcttggacctgggaggcagaggttgcagcgagccgagattgcaccactgcactccagcctgggcaacagagtgagactgtctcaaaaataaaataaagtaaaataaataaaaaagaaaaaaaagaaaacgccatggccagaggcgccacattttagcttcaggaaactgtgttgaatactctgagttgtaccagcagggacactcccagccgcccataggtccttgtgctgagcaccgggcattgcctccttcctgcttctaccaggaaaattgctgtctgggagccttataacacagactgctggggtttgtgggagatcaaggattatgttccctgtggactagtttgaaaaggttgaaattcagccccttcataatgtcatgctcgtagctaagaaggcttgcctttttctcttcctttgtccattttagaattaactgtggatatcggtaaaagcagcctcaccactaatacatgtggggctggggccgtgatacagcccaaggcccctatactatatatctgcatattttcagagataaatcagtctagtaaatggctaaatatagcatgttctattgtcctaccttgatgctttaaaatgtattattcaggcatgatgaggccaacagatcaggagacagctgccattgaaaagagtttgttactcacagttcccaagggctgggacatgccatgctatgccaggccacatggcgatgcaccagcattggtgaggaggtagagagagtgagggggaagatgtgggcaagagtattgcggtttctgtgagaaggaatgggaaaggcaagacaaccaggcttgggattagctagtttgaataacttccgtggactctggagtatagggggtgtccctagttatctgatgccaggggcaaaggatagtagcccagcatgtgagaccctagtacaggaggtggttgggggtgtgggttctggatttcttggttatcctagcaagggtgtgctcacaggttagttgtttactctttctaggaatgaccctgggaggagcagtccctctagagtcagcaaggccccaagatgtcaaagcatcataaaatactgaaaatgaaaaagaacatgattgttgacgaagaacatgacttgacaatatgactttttttttttttttttgagacagggtctcgctgtgtcacagaagctggaatgcagtgatgcaatcttggctcactgcaacctccacgtcctgggttcaagctattctcctacctcagcttcctgagtagctgggactatggacatgtgccactacagctggataatttttgtatttttagtagagatggggtttcagcatgttgaccaggctggtgttgaactcctgacctcaggtaatccacctgcttcggcctcccaaagtcctgggattataggcatgaaccaccacacccagccacaaatatgacttcttaatgattaatgattaggagaccaggtatgagtttagaatgcttgaattccttggactctatatcagaaagcagaggtgccagagcactggtccactgaacccagcctccagctctatttttctgcacatctctgttttccctcaccatgactgtcttgcagatttgtgcacagacactccagcatgtgtgtctgagttttgtctacctgctctgtggtgggggcttggatgcactgcccagatccttcttctggaaggaagggtcaggtttctgcagctactcccagctgtcagcctttcaggtttgtgggggctaaagaaaatggccttgtccaaagttgcatctggatctggtatccaatcaatgcagaggcataaaagccttgtcccttgtgctaactcggaagaagggctccttggcttcagagctccctgtgggttggctggggcatttgtcagatatgctttgcagctccgtgcaatcctgcctcttctctgcactttcacaggtggtaagcagaagagactccctaataagcatccagggtgttaaactctacctcagggtcagcttcctggggaagcccacccaccacagtccctttccactcactttccttccacatacccttaacgcagcaagccccctgcaccctcaggcctaggaaagcacagactggccatactgtgcacactcagaagcctaagctggcaaagaggcttgcttgagtttaagaagcggaagttacaatcctaatctctgataaaatagactttaaaccaacaaagatcaaaagagacaaagaagggcattacataatggtaaagggatcaatgcagcaagaagagctaactctcctaaatatatctgcacccaatacaggagcacccagattcaaaaagcaagttcttagagacctacaaagcggcttagactcccacacaataatagtgggagattttaacaccccactgtcaatattagaaagatcaacgagacagaaaattaacaaggatattcaggacttgaactcagctctggactaagcggacctaatagacatctacagagctctccaccccatcacaaacttaatccatcacataaataccaaatacattcttctcagcacctcatcacacttattctaaaattgaccacataattggaagttaaacactcctcagcaaatgcaaaagaatggaaatcataacaaatagtctctcagaccacagtgcaatcaaattagaactcaagattaaggaactcactcaaaacctcacaactacatggaaactgaacagcctgctcctgaatgactcctgggtacataatgaaatgaaggcagaaataaagatgttctttgaaaccaatgagaacaaagacacaacaaagcagaatctctgggacacatttaaaacagtgtgtagagggaaatttatagcactaaatgtccacaggagaaagcaggagagatctaaaattgacaccctagcatcaaaattaaaagaactagagaagcaagaggaaacaaattcaaaatctagccgaagacaagaaataactaagatgagagcagaactgaaggagatagagacaagaaaaacctttcaaaaaatcaatgaatccaggagctggttttttgaaaagatcaacaagacagatagaccactagccagactaataaagaagaatagagagaagaatcaaagagacgcaataaaaaatgataaaggggatatcaccacctatcccacagaaatacaaactaccatcagagaatactataaacacctctatgcaaatgaactagaaaatctggaagaaatggataaattcttggacacgtataccctcccgtctaaaccaggaaggagtggaatccctgaataaactaataacaagttatgaaattgaggcagcaattaatagcctaccaaccaaaaaaagtccaggaccagatggattcacagccgaattctaccagaggtacaaagaggagctggtaccattccttctgaaatgattccaaacaagagaaaaagagggaatcctccctaactcattttatgaggccagcatcatcctgataccaaaacctggcagagacaccacaaaaaaagaaaatttcaggccaatatttctgatgaacatagatgtgaaaatcctcaataaaatactggcaaaccgaatccagcagcacatcaaaaagcttatccaccacaatcaagtcagcttcatccctgggttgcaaggctgtttcaacatatgcaaatcaataaacataatccatcacataatcagaaccaatgacaaaaaacacattattatctcaataggtgcagaaaaggccttcgacaaaattcaacaccccttcatgctaaaaactctcaataaactaggtatcgatggaatgtatctcaaaataataagagctttttatgacaaacccacagccaatattatactgaatgggcaaaaactgaaagcattccctttgaaaaccaacacaagacaaggatgccctctctcaccactcctattcaacatagtattggaagttctggccagggcaatcaggcaagagaaagaaataaaatgtattcaagtaggaagagaggaagtcaaattgtctctgtttgcagatgacatgattgtatattaaaaaaactccgtagtctgagcccaaaatcttcttaagctgaaaagcaacttcagcaaagttgctgttatcaatgtgcaaaaatcacaagcattcccatacaccaataacagacaaacagagacccaaatcctgaatgaactccctttcataattgctacaaagagaataaaatacctaggaatacaacttacaagggttgtgaaggacctcttcaaggaaaactacaaaccactgctcaaggaaataagagaggaccaaacaaatggaaaaacattccatgctcatggataggaagaagcaatatcatcaaagtcaccatactgcccaaagtaatttatagattcaatgctatccccatcaagctaccactgactttcttcacagaattggaaaaaactattttaaagttcatacagaaccaaagaaagagcccacatagccaagacaatcctgggcaagaagaatgaagctggaagcatcacgctacttgacttcaaactatactacaagcttacagtaaccaaaacagcatggtactggtaccaaaacagatatatagaccaatggagcagaacaggggcctcagaaataacaccacccatctacaaccatctgatctttgacaaacctgacacaaacaagcaatggggaaaagattccctatttaacaaatggtgttgggaaaactaaccagccatattcagaaaactgaaactggaccccttccttacaccttgtacagaaatcaactcaagatggatcagagacttaaacgtaagacctaggaccataaaaatcctagaagaaaacctgggcaataccattcaggacataggcgtgggcaaagacttcatgtctaaaacaccaaaagcaatggcaacaaaagccaaaattgacaaatgggatctaattaaactaaagagcttctgcacagcaaaagaaattatcatcagcatgaacaggcaacctacagaatgggggaaaatttttgcaatctatccatctgacaaagggctaatattcagaatctacaaagaacttaaacaaatttaccagtaaaaaacaaatagccccatcaaaaagtgggcaaaggatatgaacagacacttctcaaaagaagacatttatgtaacaaacagacgtataaaaaaatgctcatcatcactggtcactagaaaaatgcaaatcaaaaccacaatgagataccatctcatgccagttagaattgcgatcattaaaaagtcaggaaacaacagatgctggagagggagtggggaaatagggatgcttttacactgttggtgggagtgtaaattaattcaaccattgtggaagacagtgtagcgattcctcaaggatctagaactagaaataccatttgacccagcaatcccatatacccaaaggatcattgtactataatcattctatgataaagacacatgcacacttatgtttattgtggcactattcacaatagcaaagacttggaaccaacccaaatgtccattaataatagactggataaagaaaatgtggcacatatacaccatggaatactatgcagccataaaaaaggataagttcatgtcctttgcagggagatggatgaagctcgaaaccaccattctccgcaaactatcacaagaacagaaaaccaaacaccacatgttctcactcataagtgggagctgaataatgggaacacatggacatagggaggggaacatcacacaccggggcctgtcgggtggtggggggctcgggaagggatagcttttggagaaatatctgatgtaggtgaccggttgttgggtgcagcaaaacaccgtggcacgtgtatatctatgtaacaaaactgcatgttctgcacatgtaccctagaacttaaagtataattaaaaaaaaaagaagtgctcccagggacatttgggcaggaaattcccgtgttctgggtaccaagaacacaaaccagaattgaaggggcaaatcttttggccatgtgactgcctcaccatgcagaggggcattctggaggaatctggaagtgagggttctctatcatgatgcccagggcaggggcccctcttgggcaggtccaagggctattctagattgaagcagatattcaatcatttgtatttttcctgtgttaatttttttttttttttttttttttttgagacagagtctcaactctgttgcccaggctggagtgcagtggtgcgatctcggctcactgcaacctccgcctcctgggttcaagcgattctcctgcctcagccttctgagtagctggcattacaggtgcgtgccaccacgcccagctaatttttgtatttttagtagagacggggtttcaccatgttagccatgatggtctcgatcttctgacctcgtgttccacctgcctcggcctcacaaagtgctgggattacaggcgtgagccaccgtgcccggccttcctgtgttaattttttacacatacttgttcatcacccatgtatctatcacctgcatattaaaggagaggagacctctgtgtgtgtcttactagccggggcacgttgtcttagcatctttggcctctaatgagactatgtttataagcaaaaggtgcccagtcaggcatagtgaggccacttgggggtgagggccggtgcctggatgtggacagcatgtgtgtgttttgaggtgggagtaaggcctggagtgatgaatggaactttatagccaacaaaaggctttcctcaaatgggaagttgttctgacctcactttgtgcctctgcttggccaatttggcctttttcctgccaaatccatttggcataaggagcaggcagtatttgggctggctgcttgggaactttgtaagacagttgaggagggcacctccagcctggaaaacactgcgtagtccggatctggctgccttacgggggcgccatccttggccactgagcacaaactacgtcttcctgctagtgtcccagcagctctcccaacagcaacagctcagaccacccatcagacccacaagctcgtgtgtcttttaacagttgcatatgaaaagcctctgctttagagggaaaagtaaattctttccttttgcgaaattccctcagtgaaattcataaattatgtttcatcacaactgggcaacaatattgtgtatttgtaaaaacagagcctttggcataaaacccaagtgggtctgaattttttatttactccttgaaataacttctcccagccccagtctccttatcctcaaaagggatttagagagttattgtgagaattaaacaaaataatgatgcacatggagcatcctgccagcactcagtgtgagctcacttttcctagcttaagaagatcaagtgtggattggggcttgttttaaacacaagttgtttaagaagatagtattccacttttaaaacaaagtcccaaattttcttccttcttctgtctataaaaaagaatgaaaaaaaattctgtgtgtgtgtgtgtgtgtgtgtgtgtgtgtgtgtgtgtgtgtgatgcccatatttcagggaaataacaggagaaagaatcaaagaatgagactgcatattctcagttgcatactactaggtaagacagtaaataggcattctaagcaatttaaaaaatactgtaaattaatctccaggtcacaactctttcagttatatgcgccagaaagcaagaaagcaaacccaaatatgcctgctgctgtcagcagggattgctgagaaaagttagcctgtctttccatttagaaaaagcatttgacaaaggcacgtgagtgggaggctgtgaagtgaacctgcttggaactgatagtgttagctttttactgacctgctttccataccgcaagcatttggtttttcttttgtcattgacttgtgcggatttattagactgtgtgcttcaagggtgtcaggagattgcatgtaggagcaggtctgaactgggaaagtgagaattaccatattagatgatacccaattaactagtgacaggcacagcaggtaaaatcggtacctgggctttatctactataagcactcgccacatagcaaacatttttaaacctggtggagcttccttactcatttctcctttccttcatcctgcccactctcccttcctgtctaagcaaggagctgtgtctacctatgtaagtatcaagacagacaggtctttgagatgtgctccagggttcaagggcaatggggcagaactctctgagggtggtgactcactgggaagcaacagccacacaccaccccacaggacaaaacagtggaagtggaggcatcaacatagttcagaataattgattttacttttttcatggacaactgagtcacaggatgatgtcccagttctgaaaacactttctcactctctgttctttgggtacctttgccagcatgaagttacttactataactcagcattctcactcgcgttactcaaaggtgaaaagctggaagaatgagttaatcttacttccacattcaaatgtggctattagggcagtgatggaagctcagagcctgtgcttttggacaggctgatttcctgtagctactctgtcttcctttggtgtgggatcatgtagtccatctagtgatcataatgtaagcttggagggaaatgatttggaaataattgggaaggtaaaatgatatgacatgaaatgcctgctattctaaaacacaaatcttattttatgtgcaactgctgttttggattatccatgcctcctcctgcatcagctagcatggaaaatcctttaagatctctaactcagtcacttcctcagggagtcatgtttaaaccccctcaagctgggccaaatctccctccatgacgctctgagaatgactgctgcttttatcattgaatctaacttgttgcttttattagtcatctattgatgtgactctttctgttaccaagcctgattttcttaagcccacgggcagcgtgatattcacctctgtggccccagtgcctaacatggaatctggcatgtgttaggcatttaaggaacattagaggcagggtgtggtggctcacacctgtaatctcagtactttgggaagtggaagtgagaggactgcttgaggccaggagttcgagatcagcctgggcaacaaagtgaaccctcatctctacaaaaaaattaaaaaaaaaattagctgggcacagtggctcacacctgactcagctattcaagtctcagctgttcaagagattgaggtgggaagatcacttgagcccaggagttcaaggctgtagtgagctataatcacgccactgcactttagcctgggtgacagagcaagaccttgtctcaatgtctcaaaaaaaaaaaaaaaaaaaaaaagaaaagaaaagaaagaaaaagaaaaaacattagatgaatgtatgaatgacagtcaggtataactccaaagagaaaccctttccctgttaccacttattaaatcagtaggactcatatctgttaattttccttctctctgtaaacatcttatcaacatcagagaaaaagagacagagaattaacaacaacatactgaacgatgccctgacaatgagaaatgaatcccttgctagtttggtaatgatgcatttatttggctctggatctagagaatttatattgagtagtcaaaagcctgggaaggactgaactctgttgaactcagaaatcctctcttgagagttctagctaaactagaactaccacagataggtgatagcagaatgctatatttgaaatgctgcaaataaataaatttatacatgcaaatcaaaatcttttagtaaaatcacacaattaacctctcactggggagaaagagccaatgtagatatatgctttagaaagttgttaatcattttctcattgcaacctactttgaaatcaccttggcctattgtctctcatatatatatgtttatatatatatatatatatatatgtatatatatatataaacttattttacacaatgtagatttattttatgctgatatactagtaatgttcttccctacattttacaaacaatgagattttcatttattgatggctggtctttgcaatggtcagtactctttgtaactctgactttttacagcacagcctttggcctcccctgaatttagtgtctttgaacacctgcttcattttgttggtgctgagatttcacatctcatgtgcactaactgctgtcatgttatatgaagttgaagtcatgtgttttgtaacaatgagctctggaactatcccttactggcagtgtgactttgaaccttactgctgctccatttaaccaactgtaaaatggtgataatggtagagctgcttcactgatactattatttagttcatgtttagaataaggtgtttaaaacaggtcttgcaaaagaaagtgctcagtaaaatggtagctaaattgatatcacgcgtgtccccacagtgggtctccaatgtgacagtcaatatcatttgcgtatgagcagacaaaactctctaggttttaggggttcatggttgatatttcctttttgcccttcagtgtgaaatttcactcacgtaggacttcatggaaagaatctaccatctttcaaggacttacacaatcttatgccatcctacctgccaagacattccagctgcaagtccattttcctgtattgctgactttcctgggtcttttcaggattatgttacctcttcatcctcatgcatgatttaattatccgaacaaaggttctttcattcactcgaagacagcataataccttagatatttgaaaatttctcagagttctaaaatttctcctttgtctttcacatcttccttctgaaagattttactaagtgggagttaattttatctaaattgattcttgaatattgatctttgaaatctgatgacttattttcataaatgtaggccaggtctcacttggtacttaatgttaatttagaaaattccaataacgtggctaatgtttgacaaactttgccattaatgctaaactggggaggtccctttggcttccattttcaaaggtgagatcgtatcgtactgatcccgtctgaggatgccttccttattaattgagggtggtggggctggagtttcttcaaatcactggtccattcaatctgatagcaagtctgcctgggtgttactcatttcccatgctattttcatgtcaaatactgctgtccccttatgcaagggatacaattcattgaaacctcgttggacttcctcccacttaacattctcctaccttccgtgttgacattcttctaccttccaacttccgtgtttacactgaaaaagctgttgctgggtagcttggttattttttttcccatcagactcatagggatatttttggattattggttatgatgaatatttatggaaaatgttgctgtgcactccagtgagaaatcagtgttaaagaggctggtcccacagctatctctgtgtccctggaagccgtgtcctttttctatttaattagtgccaagtatatggtcttgcatgaaggaggacccagattgaactcctgtagcatgatgtgtgtttcatgcactctactgttttcactgatttatggcatttaattatcaatctgttaatccaagtttttgtttaattggattcatcaaactaattgtatgaattccactctgttatcatggcctgaacctgaatatcagattcccttaataaacagaaacagtgaatgtgttcctgcttcttcctgatcaggaagggggtctgcagtcctctggtcttgtttgtttcgtagcatttcattttgtattcagcatttctttgagcgccctctttgcttcttggaaccttgccttactaccattgccattctcataggtccctgctctactggacctaaaatggtagggaagaaaggaagaggaggggagtaagaagagaggaaaaggtgagctctattctccgtcagcgtgtctgtggctgtattgattcggaagtttaaaatctaaactccctgtctacagtcttggcctgtcttgaaggttgtgagtcaacttagtgaatacatgcaaggtacttttaggctgtctggctgggagataagttgggtccaaagaaagtaatagttcaacatagcattctccttagatggcagcctccaggcaagaagaaaagcccatggctttgcctggaagttcttgtgcaggtccagcgtgtcaccaactggtgcttcagacactgagatgaggcaaatacttagcattcagtttcttaacaaagtgattaacttgatagacatctagattctttttaaacataagaatatggctttcttttcttcaggtggtgtgtccatttttgtccatcggatagaaggtgctatcacaatataaatggcgcgttgcgtacgatcagcaagggcttcttaagttactcccacttccttagtgatactgtccagtctcattgcttcaaacgccaatcccaaatgtctctgttccagaactttcccaaactccagactcagatatccaacctcacacttgacatctccactgaatttctaaaaacttctgaaatttaacaaatccaaagccaaattcttgtctccccaaacccatttcacttctcattcttcccatctcagttgatggcaatttctgttttttttctggtggcttagggtaaaaatctgtagtcattcttgacttttttttttttttttttggaaacagagttttgctttttgttgcccaggctggagtgcagtggcacgatctcggctcactgcaacctccgcctcccacgttcaagggattcttctgtctcagcctcccaactaggtgggattacaggcacccaccaccacgcccagccaatttttctatttttagtagagacggggtttcaccatgttggccaggctggtcttgaactccagacctcaggtgatccgcccacctcagcctcccaaagtgctgggattacaggtgtgagctaccgcacccagccaacttttctttttcttacacctggcatttgacccaccaggaaagctattgtctctacctttaaaatatatctaaaatctgcccacttatcactaactcctgctaatgcactagtttaagtccctattgggacatagaatatgatactacaaagtacagcaccttggaaactgagaaaacagcagaagcagaaagggtactctgaccatctgctgtctttctgtgtgagctgatcttaaaggactctcttgcttaccttccctgaaaggtgagcataagacccttatgtgacagttgccctgccccccaatgtggagggaaggaatgctacacagaggccaaggagattctgaacaaacagccatgctgagctccagtttatcaccattagatcatgtttttgtccaatcacgtttctacacagctgtccatttttcatatgcttcattgaacctaagcacaaaaatagacagttttctctgggtcttggggtcttcatctctgaaggctcctatatcacataaaactttggtcacataaatttgtcatgcctttctcttgttaacctgtcttttgttataggggtgtcagccatgaccctggtgatgggtgagaaaaaatattctacttttcctcctccacatctccatcatcttttcctggacgattgcactaacctcctccatgtctttctgcttccaccccatcctcccttatggtgtattctcaacatagttgctgtaggtcaatctcatttttttcttctacagtgtttttccattccactcagaacactcaaaatcctgatagtggctttctagttactacagctgtgcaacaaaacatccccaaacttaatgacttaacatcaccattaattatgtgcaaaattctgtgagtcaggaattcagacagggtatagtgggggggacttgtctccatcctgcgatgtctgggtccctcagactcagaggcactaaccacctgaaagctcattcactcaggtatctggaggttggtgctggatgtattctaagaccatcacccaggttttcagcttaaacacctacacagggcctctccatgtggcttgggcttcctcacaaaatggtggctgggttcccaggacagagagccacgcagaaactggactctagcctcagaagagttatagaatcccttccatcatactcagtgggttggagcagtcacagcctgtccacattcaagaagagggaaatagtctttacctcttgatagggagtggcaaggttctggaagagtatgtggtaccagaaatattgctgtggccattttgagactatagtctaccacagtggcccgcttgattggacctgggttgtttctctgccttcatcttttctccctatggaacatttggctccggccacacttgctagagcatgcagatgtgcttctgccctggggccttcagactgcctactccattcacaagatgcctgttgatgccctcttccctccctccgcaaacttttatggagtgtcatttccccagtgatgccttccctgaccactctacagccccttttcacttgctgtctttttttttccccttaaatccttattgtcattaccaccttctaatgttttatggaatttttatgtttattctttagcatcccttgctgccagaatggaagcactacagaagcaggaatctttacctcttctgtccactgagctatctcacatgcctagaacagtgtgtggcacataaatatgtatgggatgtgaaacagagagggcgtttctggtttgggcatttggaatttgcaataattgctccagctagcacaactaagtttgtgtgttagaccagcataagtcaataaaaaaagataccaacttaaacagttgttttcattgtgtaaatgtctctttttatcttttatggactaatgaaccagaatgtttaattgttttaatttccatctaaatatttagtttctttatgaggaatggcagggtactttttccagttccacagtccctcaccttacacatacacgttgactgaaatagaagtctaagaatccccagacactccagtagcatgaatctgggcagcctggcttctgtgtttccacattctccaactttagagtacatgagcccttcagcataaataacccttcagaataaaggttgtaataaaaacaatgataaaacccacaataacaataataatactagtaatagacatggcagcaccattgataattccagccaccatttgctagaaaccccttggctgcaggtgttcttccaggcacttggtgtgcacgtctgttagttattatcttgagaggaaggcaccttcattcctcggatgagcaaaaggggagaacttgttcaaagtatatcaaatctcttttatccgtaaagtgcctctttgatctgctgaaccatagcaatcattcattccttcaacatttggtaattaggaagcgctgagtttatctcaaagagtagctgatctcatcactcattggatgttgagcagttgatttctagttactggcagaatcccatgtttatgtttatttctcaatgaaaggttccacaatcctcctctacccctagtgtggctcttctggttcatctgtaggatgggaatcattacactgtcaggttctctttccctgtattggacaaccgagccaatggctatcagttgggaaaggtaagagatagagcacatgtcatccagtgatagactatcagtgagctgctttttaaagactacagcaaggctggctcagcgctattgctccagcctctgactttctcctgcagagacactcagagccccggaatcctccccaactcatgacttcaggcagccactccagtggatttgagtgttttccaaacatagaatgttacgattactagtggcttgacctcaatcctttggctttgagcttttagttgaatggtttttattcaattgtgactgcagttgcattaactttggatttcctttttttcccccagaaacaagtgtgaaggaaaatactatgaagtacatggaaacacttaagaataaactgtgcaggtaaggataataatttctgtatttcagactccgtagcacatctagattctttattataacagaatttagttaaatcgatgaaaaaggctggccagtttctctaataaattaacaaagaaagacacaaaaaagccttttgaaccccatcagtgaaagagcaggtgccagccctcatcttgtcttttaaaaagtaagtagattaagatgtttaaaagtgtcttggagagatcacaggagagttttcatgttccataagagaagaatcttctttactatattaaattcagaattcattccttagtctgtttttcccttttttaaactttagtgtttgaggggggtcttaaggattttaaggcggtttatacatggtttggaataatatagaaatgcacgtcttaggttctgttttgaatcctgaatcaaaaccagcatgaaaatttctggttgctttttttaaaacccaattaggaattcatctttgagaaatgtcagggatgctgcagcatgacaagatgtttctggcttttgtggatgtgtgcttaggaaaataaatcccagtcatcagaatctgttcctaattaaggcaacaagtactagagtggaatatgcgctttcttccctggaagtcatttagttttatggagaccattttgctattattttggaatttgttaagtaactctttagataggctatgccttaagcctttgtctgctaggacgctgtcttgagctaaaatgctgcttttccattaagagatgttgagagggcctgccttgcagagccctactcttcagggtaagcaaggcactacaggatttattctcatccttggaaagccgtcctataacctcctgattgatctttccctgcttcccatgctcctagacttgggaagaatctatgacacaggtggttagcagaggtgagcagaatgaggagagcttgcacctgggtcagatgctccgctctgagtctggccttcctcctctcgcatgtgttcggggcagatttctggcacatccttcttgatctcaactgcagctgccattgttttagccatcagcacagcacacaccgtaagttacattaggttatcaggcagccagtggtagccataagcacgtgggtattggtaaagagacacccatttaaattgcagctctcccacataaaaactgcctaaccttaggtaagtgctcactttctgttcagtttgttttgttttgtttttttagctatataactggaggaaaggtacctacctccccagctggtgtgtgaatttaaataccatatgtaaagcattcatgtgattggtagtaggcacgcattagtttcctttaccttcttcttatttatttatttatttatttattttgagatgaagtttcgctcattgcccatgctgtagtgcaatggcgctatcttagctcactgcaacctctgcctcccaggtactagcgattctcctgtctcagcttcccaagtagcttggattacaggcagtgccaccatgcccggctcatttttttatatttagtggagatggagtttcaccatgttagtcaggctggtcacaaactcctgacctccggtgatccacggccttggcctcccaaagtgctgggattacgggtgtgcaccatcgtgcccggccacctccttctttatatcattagaactgattggacacttatgagtggaaaaacacaaactgcttttcctctgttctcacacaatgcaataatcaacacagaaggcttctgtgatgaaatacatgagggtttctccccaccaaaaagtaagcaatcagttctgctgcagataccagctgggtgtcctctaactcatttccgacaccagctacctggagacagcatcagatgccacaggttgagggctcagtcccacaagactgccccacttacaatgccaatggcaagcccaggttgttttgcctgggcttctgaccaaccaactagaaattgggattcccatgatcccctccttgggtttgattaatttgttagactggttcatgaaattcagaaaaacacttatatttactggtttattataaaggaggttacataggatacagaagaagagatgcatagggtgaggtatgggaaaggggcaccaagctttcatgccctccttgggcacaccatcttcaaggaacctccacatattcagctatctggaagctctctgtaccctctcctcttgggccttttgtggggacatcactggataggtgtgactgaagtatggacaaccatgtagcaatgtgattggacagaaactgtgacctaccacaaatagactgagtgggaaaaccccacagggcctgtgtgttcagattccccagcttctctgtgcagcgtttcttccttcaggtgtgggacaggactccttctgaaatgagggtctatgacctacagtcagataaggtaggtcagagaatttctttccttctttctttttcataagttcaacttttattttagattcagggggtatatgtataggtttgttatatggatgtatcgtgcgatgctgaggtttggggtatgattgatcctgtcactcaagtagtaagcacagtacccctggaattagttttcaacccttgcttcccttcctcctctgtcagtctccagtatctattgttcccatctttatatccatgagtacccagtgtttagctcccacttgcaagtgagaacatgcagtgtttggtttttcgttcctacattaatttgcttagaataatggcctccagctacatccatgtttctgcaaaggacatgattttattctttatatgactgcatagtactctgtggtataaatgtaccatgttttctttatccatttcaccattgatgggcatctaggttggttccatgactttgctattgtgaatagtgctgtgatgaacatacgagagcatgtgtctttttggtagaatggtttattctcttttggatatatacccagtaatgggattgctgggttgaatggcagttctgttttaagttctttgggaaatctgccaactgcttctacagtgactgaactaatttacattaccaccaacaatgtataagtgttcccttttcttcacaacctctccagcatctgttgttttttggctttttaataatagccattctgactaatgtgagatggtatctcattatggttttgatttacatttctctgatgattaatgatgttaaactttttttgtatttctgttggctgcttgtatgtcttcttttgagaagtacctgttcatatcttttgcccactttttaatagagttatttgttttttctttgtcaaattgtttaagttccttatggattctggatattagacctttgttagatgcatagtttgggaatattttctcccattctgtaggttgtctgtttactctgttgataatttctttttctgtgcagaaatggtttagtttgattaggtcccacttgtcaatttgtgtttttgttgcaactgcttttgaggatgtgggcatatattctttcccaaggctgatggaaccataaaagagcctgaatatccaaaacaatcctgagcaaaaagaacaaagctggaggcaacacgttacccaacttcgggctaaactgtaaggctacagtaacaaaaacatcaaggtgccggtataaaagctgagaatttctttatggtcagctccaagacagaaaggcagggggagattagggtatatttttagtttttatgaactgcctaggggagaaataacagtggatgtgggagttatgagccaggaattgtagatgaaaacctatatacataatttcaacagtcatgcttggaactcatcctctctccctccatgtcagctcctcctcctgttcatccagcccaatgcacggcccaccacccacctggctgcctgggtgggcgggcaccatgggctcatgctggctcaccagcctcctttctcactcagttcccagtcttgtcagtcttgcctctttagcatctcacaagcctgcctacctttatcacactgacattgtgggcccctcttctgatcataatagcaacttttcctgctttgctgttccactgttgccctcttaccaccttctccaggtggttttgagtaagcatcttaaaataccaatctggtcattgcacaaggctgcccgatgtcctaagcataaagcctaaatgccttaccatggttcatggcattcttccatgtggcctctgcatgtacttgattatcacccatcactaccccatcatcaccctattgtagctgatacttgttcccttatgcttcccaatgccattgcatttttttttttctggaaagaaactaatttagaaggggacatggttaaggagtatcatccagagaaatattcgattgaatcatgtgaaattgctgatatttcaccatttttgacctagaaaaatgacaatttcatatagttaacccaatatttagggatttgaagtcatcttcagaagggtcagatgctgtggctggtctccttgcccttgacacacaggcatagtttgctcccccacccctctgcatgtgccctggtgggcctctcccagcccacccctcaccctcaccaggccttcccattcagccttcaaggtttagatttctcctctgtgcaaccttccctgactaaccaagactgagtaatgtgcttgcaatgatttattctcactttccaagtgctccttgacaggtattataatgtagcaggacaagccgcagacaaaactcctcagacgctgagttaaagaaggaaaagctttattcggctaggagcttcggcaagactcacgtctccaacaactgagctccccgagtgagcaattcctgtcccttttaagggctcacaactttaagggggtctgcgtgagagggtcatgatccatgtgagcaagcagagggtacgtgactgggggctgcatgcactggtaattagaatggaacagaacaggacagggattttcacagtgcttttctatacaatgtctgaaatctatagataacataaccgattaggtcaggggtcgatctttaactgccaggcccagggtgtggcaccgggctgtctgcttgtggatttcatttctgccttttagtttttacttcttctttctttggtggcagaaattgggcataagacaacatgagaggtggtctcctcccttaataagattaagtctgccttgttcaggactgtattctcagtgatttgccagtgctggatggtacaggggttcccaataaacatgtattgaatgaatgattgaataaatatgtgaattaatgcaaataatttgtaaacatcctaggctcatcttttgtcatctccagcctctttctctgcctctccagccatgctgacgttgcaaagccaccttgcccctggcctcttgactcacataccttagctacctaggatcctgccacagtctcaaatgaccgtgatagtagctggcccttcctgtagcctggagggctcttttcatgctatttcaagctattatgaggcctgggtcagatttgtgtgaactggtatggtgtaaacaatggaacagggaggagaaaaagcagctaggagtctgcaacccctctggcagtaggcaattctattcccacttcagaacaggaggccagagtggatgctgcaaaagcctggtgaccatcaggctctctgtgacagagcccagtagttatggttgttttcagacactctgtgggctccactgataatctgtcaccttcacagttcctttccaagaggatcaacattttacaataggaaaacagttttaacacctgacacagtggtgcatcttagtgactgcttgattaacatctcaagttatccattaaagaagatgaaaatctttacctgttcccactgttcagcgtttcttggtcttacaggattttagagaggaagcagctgagaacagaatggattgctccttttccattagaatgctggagagcatatacttaaagatcagagctaagaaacctaaatctggctagtcaccattttggggacaaattcaaatgatagcactatctttgttactctttcaaagtatacagagacctgaagacccagatattgaggcaaactcaggtggactcaagatctattctctatcaagtatatcaagtgagttagaaagtgaggaagtatctgatgctggcagtggttcaaaagcacatcttgcataactcaaagcaaaaagtggacaaatattacatgaggacttttagtgtatgtttaaataagggtttgccttgtaatcatctgagttataagttagatgcatgtattcctgttcctccttctacaaaggagagattccatttgtggattttttttccaatttccacctgttttaggaatatccctccttctccttatccatagccaaatatccaggagggtgactgcggtcagtacctggtcattccatagaggctttcctctgcattcccatcactactacctgcaacttggcccattaaataatctcctaacagcctctcttccctcctggctcacaacagtttagtctgctcttctcccacagccagaatgactttattaccatcctgttaggctcctttcgcatccagcataaattccacagtccttgttatgtcctcctcctctctgccccttgggctcttcatgaggtggttccaggctactggtccaacctcatctctgtaatcctcatctgcaccaggtgactgatgctccattctagcccatttccctacattaactgtgctccacagcagcacctttgcagagccctccccgacctagcccctgtgctcacactcatccttatgactcagcacaattgtccttctctataaagcctttctggcctcctgctatttcctgcatggtacccatagtggtagccatgtacacgaatgtgttgcattcactcagtctgtctaattctattagactgtgagctccttgtagatggagcctttacttttcttatattccaagtggtattctaaggtttccatgccttactttccttgtattctaagtggttgtcgtgctgtttggcatgtagtcaacagacaaattgtatttaatgcaagaatgaatggataaatcgcaattttatcttgttcctccttggaaatttatttgcaacttgattatcttgacactatattctcaactattacattcagaaagtcaaggcaacctgagaagatacagtgcccaaatccatttgtcttgccatcaaatcttagtggtatataatagaatagaaaaaaacgactcttaaagagcttgacccacttactctcactccttcagggttattgtttccagaggtgagtagttaagtgtgattttctcctagcttgttttctcttatggccaaaccttgctttagtttttattttctcaattattacatattatctgttatcttttttaaagggtcaaatgaaatattcagaaggctttactttatagatgggttcctgttgaaatggatcttatatctctaaccattgtacaggaggaattcattattgcctgatggcaaactcatgtctctggaccaagtgggccaagccctccccctgaggatgggtgtagtggttccatttaactgatggaatctcttgtatgcatgactaatgtgaacatttctcttctttctagaatctcttcattctaactctactttttttcctgaagttcaacataaaacctttaccacgaactcttgagcacttggtagattataagtgatgcttgcgtccttgtcctctagtgaacctttaccacaaactctcgagcacttagtggattatagctgatgtttgtgtccttgtcctctagtgtgttcctcaagtgtttgcttccagtgtgcatcacacttttatcatcagaaaagacaaacaaaaaatcttttaactctgttttgaacatagaagaaagtagttggatacctccttggaggcccttcttagctttagaaggaactgtcaagaactcaatggtcttatctgaaatttgctttgaaatttagagattgatgtatttttacaaagatgatccagttctctttttaaaaactaatgtttactttttaattattaaaatttcaataggacagcctgatgtggaatgatagccaggtgaactcaccctgctaatgaatgtccagaggtggccagcagggtgagcagcacctgaaagaccaaggtctgttccctcacccaaggctcccagagcctgtgtgtcatggccaaaagagactgtaaactgccaactgctctcaatctaatgaagacgggaaccggggtcaaaaattggagcaattgtttccaaaacaggtgcacacaaaacagtttactggagtgtgggaagaacatattataatttctattttatgcttcaatttcatccatttatattttatcttcaaaaatgttttatatgtatgtagtaatacatgtataccacttgtgaaacaaatattggagtttcataattttcttactgatgagtgcacacagtttaaattagagagtgttgaaaaaatattcatttacttatgttctaatattaaaccatagcagtctccataaaatattcactgtcggatttatacacttttgaactttgaagctatttgactattttgaccaattttacaagagaaacaatgatttacattaccttatcagtttgaaatgcaaactgtaagaaaatataaagcgcttaattctacaaagttaagtgaaatcattaatttgataatcattgatttttgcatttaacttttaccttatctcatcagaaaaatcttaagtatgcttaaaataataatgcataagctaaacatacgcagagaaaaactgcataaaatataacaaaatggcgtgaattaaaaagagtaaaaaaggaaggaaaacaaaggtaggaaaaacattagtaacactttgatggggattagactcaacaccatagtagttcactattctagacactcaattaagtattaactgatatgtatataaaactaagtaacactttacaatgtaaaatgtaaatgatataatttataattaacttttctgcattggcctattggtcattataatactttccattctataagaacccatgtaatgaattttaactcagaaataactttcccaggaaatgttcacttgtgatggaatttagtttccagagtactcagatcaattcaaaaaatctgcatgcagttcttcggagagagaaagcagagttccatcttctagaattccagctccctgtgttaggaaagcctttccttcaaaacaagaaaagaagccgccaaccccgaattggaactggcctcttcacatctggaccacaacatgggaggcggaggcaactcttcccttctcggtaccctgagcagacgtaccagtcacagtaattaatataaaaggtgtccttcctcttgaggcatcacttttaaagcaaaaacaagggaggctgaggcaggagaatggcgtgaacccgggaggcggagcttgcagtgagccgagatcccgccactgcactccagcctgggcgacagagcgagactccgtctcaaaaaaaaaaaaaaaaaagcaaaaacaaaaacaaaaagccctctcacacacacacaaaaacctgtttctgtttccctatgtaatgaagacccctgaggttggcagcagtgttgtccaccgccaactccctgtggtcgatctggaagcttcatctagggaggggctcatgaaggggcctcatgagtaacccctctcctgaggattgttattttcaagtaccagctctggaatcagatagtctagattcaagggtggccatttctgagctgtgggcctttaccaggttaatgcagctcttaaagacttgattttctgtcataacaatgggataacagtagaataagataaaaactatttcttatatataataagggattaatcaatgatcactagtatgtactagtaggaattatggcaccatggaaattatgaaaccaagaaactctacattaaaaaacaagttttattttataaaaacagaagagaataccttatcttcctggtgaaattgtggggagcagagagatgtttgcttgtagctaataccctccattaaggatctgccaaacctcctgattatccaaacactcagcggtttttttttttttttttttttttttgctgtctgccctttggccagctgttagcacctgctgcagagggtgggaagaaaaagaaatgaggtaattgagttcttgctaatggctgtgacagaagatttagagccttcagtggttcctacagtcaagtggcagggatcctagagcacactgctgctctcagaatggatctggcttgttctggagtttttgagattgacagagctcaaagttcccaggctccagagctcaggtgctggggaggatttcccatcacttctgagatttggggagctccaaggcccctcctcttgaccctcagtggagctcaaaagaaaatcgtcttgacctcagagacagcattttggggtgaagatactccaatatacttgtttctttctttctttcttttttttttttttattatactttaagttctagggtacgtgtgcacaacttgcaggtttgttacatatgtataccagtgccatgttggtgtgctgcacccattaactcgtcatttacattaggtatatctcctaatgctatccctcccctctccccccaccccatgacaggccccggtgtgtgatgttccccttcctgtgtccaagtgttctcattgttcaattcccacccatgagtgagaacataccatgtttggtttttcgtctttgcgatagtttgctgagaatgatggtttccagcttcatccatgtgcctacaaaggacatgagctcatccttttttatggctgcatagtattccatagtgtatatgtgccacattttcttaatccagtctaccattgatggacgtttgggttggtcccaagtctttgctattgtgaatagtgctgcaataaacatacgtgtgcatgtgtctttatagcagcaagatttataatcctttgggtatatacccagtaatgagatggctgggtcaaatggtatttctagttctagatccctgaggaattgccacactgtcttccacaatggttgaactagtttacagtcccaccaacagtgtaaaagtgttcctatttctccataccttctccagcacctgttgtttcctgactttttaatgatcgccattctaactggtatgagatggtatctcattgtggttttgatttgcatttctctgatggccactgatcatgatgacttgtttctttctttctggtgttttccttggagaaagcaaaaatattgccctagagaatggcatggacagaaaagaagaagaaggaagattagaagtgaagccctgtgggcttgtctggtgagggccctcttcccaggacttagctgcatgggaagaatctgggtagcactacaaggatggaatccatggggtcttagttgcctgtcatcattttctttgccattgataattcaacacttaatcaaatgcggtggtgtttttgaaagatagcctgaagaaaaagatgaccatgactttcactaatagaatagaaaatagacaggagattgattatcacttaaaagaaaagggttcattaaacaggttccactgtggtttgcgcaattcaacccaaagtttctctgctgtaaagcaatgataagatcactctgcccactgagatcaattgagaaatcaaccaatatttaagaaggtctgagacttggcaaggtgcccagtgactgagaaaagagggttcctctttctttaagttggcagaaagacattcagctgtgatttttacgtggcctgagctaaggaagagactgagctaaggaaggcagtgtcttgtgtaggttatatccatggtgctctatgagcctgtgcacccattatccccagatatgtcaatgtgcttcacagtgtgcacatttcatggcacctgttacagttttaaaaagacagtttaattaattaatggtgaatgttcaatcttagatggtttttttaaactcaagataaaccattatagcttgagtgtttttgatgcatttggctaggagttaggaaatcttaaagaaaaattaattgctgtatcaatggaaaccccagtaggtagataacaaatttgtcattaattaaatgagaagactttttaatgattcgaggaagcgtcgtcaagattgtatgatagtttaatttgctaacatggtatgaacctgttagcttcagacacatgattaataaaagtaaaacccctcatggaatttctcagatgctcagttctagcatgcagtcatttttgagacttgctcaatgtccttatctcactttactgacagttctgcagcagccgtggcaaatgtaggttagacaaaatattacatgcaacattttctatgattcattttgctcctttttccctcttccccttcctctccagccaccctgagtcatacaacagctgtgagaacattagttacaagggagcgagctgcagacactttaggtgctgggctgtatcccattatatctggatgctgacaccaggatgggttctaaatcccttatcacaactgcctcaggcggaaaacatttttttttccttctgttgctgctgatgtaaagatgaagtttctcgagctgagagaattttatgtgatcgtattgtatgctaagcctcagaagataattctgtagctcccattcatcacaaaagcagggactttcagttgtgcttctttaagaaaaaaattccccagtagaaatcatacaatgatttagcggactaagaaaaagaagagaatcaccaacaggatgacttgtgacaattacacgaagtcatttgactgagttatttcctttattattctgtaaatgggaaaataacgaacatgctggttatcagctgtggttttgcaatggaggcgttccaccagtgcagagcggtaattacgctgcccggtctcactttgcaaatgaactgaagcctgtctcttttaattgactgtctgtctctagaattttcttgatttattgctgctcagtagaatttacttttgttttgttgatggcatttgtcaactctagtagttaccaaatggaaattgttctagagggttgctttggcataagtgtgctcatttgtgtggcttattggagcatgaaggagagatgtgcttctgtaagatgtcttgcccttctgcctgccagaggggcaggggctcacctggagtatgtttcatctggttccttagatctgtaagtgactatgaagcctttcaactggaagagtttagtcaagtgtaactgtatgatttcggaatgaatatggccccatctttgtttcccaggtggtgagtgtttagggcattatatagcagctgtgatgatgagagcttggcttctcatctccagctatgttagtctacctaggaagaaggattcttctctaagaagaattcagtgggacaatatccagagatacaaatctcaagagacagactcctgaaaacaaattgactgctcatttggcttcagattccatgcataaatctccagctctgactgttaatcacagccactagacctcacgacataggattttagaggcagataaagaaaatggcagttgatgtcttagcctgttgctatgccagtctatgatgaactagcactacctgaactcaagagtaagaaacaaatgaaactggttataaggtttaggaaaaagcaaataagctgttactgagagtggtgaccatatggtacctatagggtacacgggccctctgtgaaacccgtaatattgggctgcgtctcctctttcctctacaacctgaccccatcgcctcatttgatggattccagtcaattgtaattttgagaattgtaagactagtatactagtatgccaatgtcttgttcttttttttttttttttgagatggagtctcactctgttatccaggctggagtgcagtggtgtaatctcagctcactgcaacctctgcctcctgggttcaagcaattctcctgcctcagactcctgagtagctgggactacaggcgtgcgccaccacgcctggctaatctttgtatttttaagtagagatggggtttcaccatattggccaggctggtctcgaactcctgacctcgtgatcagcctgccttggcctcccaaagtgctgggattataggcgtgagccaccgcacccggccgccaatgtcttgttctttaaaggaagaataaatacacatttagaagatggctacaacctcatgcaaaggtctcgaagcagcaagttgagggacagggcttactggtccaagagtaacttcaggcagggaagccttttcccatgtccttcaaattgaccacatcacttggatcatgaatgctgttgatctggtttcaaaacataagaacaagcatcttcgacaatgcggttgataaacatcatcaacaacaacccaccgaagcatcagttgttttgtcttgtccgtggcagtcctgcattcagatctgtattcactgtgtgatcacatgcatttttcctaggcctataataggtttccctccgcatgcccaaacagtggagctagcatttttttaaatttacaaacaaagattgtaaaattctaattgggagtgggacatcctttttaaataaatagtcgtattaatagtaatagcaaggagaccatctagatagtactctattttcagggctcaaaagtgaaaagctagaaaagccagctgtttaagcattggcaggcaagttatgatacggagtaccctcctcacacccactccaaactaatgtgtcatctttctctgaagagctgtggctgtttttgtggttctgagttgacggggatttttttttttcttaaagaggtacatgtttatgtttgcaacatggtatttcttgcagccatactcctcaagtcaccatctccaaagctcacacactaaacagggtcaagtgagtcaaagcagcaggagagaaccatgattggggtgtctgggactagaatggggagggcagcatgtgcgggtgcggggctggccttcccgtggtctcaagagtgggaggtgtgagtctctccctggatgtttagctcagcatcacctcagagtttgagcttgactgaaaacaacaacaataacaaatatgccgaaatatgatatcatttaaaataaacccaacaacctttaaaaattaacattattccttaatcggaccattttactggtctttttttcttaagtcaggaaaataaatgcaagcctatgtgcaggtcctcaaaaaatgtgaaaataagcctagtaaaaatctggcaagagatgtggtttcatcagccacctcataagcagatcttttcacatagattttaagagagaaagttggtttatctgcactttagtggatgcttccgtttgcttaacttccgtaataagaatccctagaaaaacctggagataattagcagaagggcggaagcatgaatttaaattcttatacccacacttaattttgtcaactttatgatttgctaaccagtgctttttctgccagtttctttaagtctagcttagtattataataaaaggaatcaataataccaatctatatagtaattttcttcaagaaattcaaaatcctatggaggaatttaagaaatattttaggccgggtgtggtggctcacgcctgtaatcccagcactttgggaggctgaggctggcagatcacgaggtcaagagatcaagaccatcctggctaacatggtgaaaccccgtctccactaaaaatacaaaaaattagctgggcgtggtggcacatgcctgtagtcccagctactcgggaggctgagacaggaggattgcttgaacctgggaggcaaggttgcagtgagctgagatcgcaccactgcactccaggcctagcaacagagagagactcaatttcaaaagacaacaaaacaacaataacaacaacaacaacaacaaaaaacaaagaaatgttttaatatgagaaaacattttgcaaaagaagacatacacatggacaacaggtatatgaaaaagggctcaacttactaatcatcagagaaatgcacattaaaagcacaatgagatatcattgtaccccagtcagaatggctattatctaaaagacaaaaaataacagattttgatgaagatgtattgtagagaaaagaagacccttatacactgccggtggaaatttaaattagtacaacctctgtggaaaacagtatggggatttctcaaagaactaaaaatagaacctccatttgatccagcaatcccactactggaaatctacccaaaggaaaagaaatcaatgtatcaaaagcctgcacttgtatgtttatcacagcactatttccaacagcaaagatatggaatcagtgggtgattggataaagagaatttggcatatatacacaatgaaatacataaaatgcataaaatacaaatgcataaaaagaatgaaagaatgagatcttgtcatttgcagcaacatggatagaattggaagtcattatccgaagtgaaacaagccagacacagaacatcaaatatcgtgtgttctcactcctaagtgggtgttaaaaaatgtgttcacatggacgtagagagaggaatgatagacgatggagatttggaaaggtgagagagtgagagggggtggatgatgaaaaattacttatgggtacaatgtacataatttgggtgatgggtaccctagagccctgacttaaccactaggcaatctatgcatgtaacaaaattgcccttgtaccgcatacatttattcaaatagaaaatgaaatattttagcctatgctcattagtttacttatgaagcatctacatggctcactgcactttcttcctaagttctctgacttctgaggcaggaggtgaggccaggcagcgggcaactgtgcttccctttctcaccaggacaggtgccaggagcaagggacctaactattttggtgcaaagtgttcattaatgggtctgtgaatcccatctccagctccagcatgactccagggcctaacattaacttgagaacagtatacaggaaaagggatgtttttgaaaatgctgattatttcatagcctctgggtgtcagccgtgaatctcactttaagccccgctagggatcctgttgccaccactgagcagaaaatgcagtgcttctgtgaaggaatggggcacagaacagtcaccgctaatgtgttcctgaaaaagccggggtgacctttcttgtggctgcttcagaggatgatgtcactttgggacagaaaaaggaagatctctttccagttcacataggataataagagttctgattcttagttgcatgttgaagaacaaacaaggagcatagacactcatcctggggaaaaagactatggaatctttggaagctgagaggccagccacttactttcctgggatagagcttttataacccccgtattgggcttaactccatacctttgacgctaaagttgttcactctctggggaaaccatcaaaacaatcaaacagaaacaagagcttttaaaaatggaatatttaatacttatggcacaaataccttttagaggattgcaatgatcatggtagagagactgattcagacatttttcaaatgtttgttggaaatgtctgaaaatgacaggcagtgatagtatcaataactaaccttcatcaagatatctgtgcatcggataatctgctatatactttaaagagattatgtgctgtatgcctcccaacaacccaatgaggggtgagcgctattattaacaagaatatgtaaggcaactgggactcagagagattcagcaccttgccaaaggtccaacaggagttcctttagcaagacttaaaaaaatgattactgtggaaatttccaaacatatacaaaactagagaaattataatgagccccatgtatgcaccttataaattcaacaaatttcaatacgtggccaaactagtttcagctatcctcccacctgctttcctaccttattagttttcttttgctgctgtaacaaattgtcacaaacttcatgacttgaaacaacacaaagctattctcttctagttgtggaaaccagaaatccataatcaagtccactggataaagtcaaggtgtccacagggctggttctctctgaaggctccaggggagaatccatttgcttgcctttttcatctcctagtggccacctgcactccttggcttgtggccccttcctccatcttcaaagtgcctcactccagtctctgcttcttcattgcatcactgtctcctttgacactgattctcactcttctgcttccctcttataagaaccttgtgattacatcagatccaccagataatccaggatcatctccatctcaagatctttaatttactcacatctgcaaaatactctttggcatgtaagataaaattcataggttcccgggattagaacatggacatatctggggagccatgaatctaccacccgcaccctagcaccaacaggaatattttgaaacaaatctcagacattttatttaatccataaatatgtcagtgcatgcttcccagaagataaagacttaaaaaataactgcaataccattatcatacctaaaaacattaataagaattctttaatatcatcagctatttagtcagtgtttcagttttacctaattgtctcataattttattttaacaaatggtttattcaaattgagaaatgtttcttaggtctcttttaatctgtcagttccctttccttttcctttacttccttctttgtaatgttgagagaactagattgtttgtcctacggaatttggcaaatgtgttcctgtggtcattcacatgtggttttttttttcctgtattttccataaactggtagttaggtcttgagacttggtcatatttatggccgagaatttgattttatggccaagaatgcttcatcaatagtatgactttctattgtaccacacggggaagccaatgtctgttgtctccctcctgtgatgttaaggttggttgctgagttgaggtgttgagcactccatccttcttgtatcaaattccccatcagctttttacctacattggtgattatggcttagattcattacttcatgagggggggttacgacatagtcataatctaattctgtcattcagttttcatttttagccagaattcttatataaaaaaataaactttcctctatttgattatcttgaggtacaatttatgaaagaaagacaggagaaatgtctaattctttctcctaatgcatccatttgcagaatagtaactggttttctagcatcctacaaggatgaaaaagtgtttgtgtatgaatgtatgtgcattagtaggaagtcacggtttcgtatattcgtgatatttcagttctttgcagaagttattctttttcaaattgccccatctttagccaatgagagccccttcagattggctacagactcttttgacattaacctagaaacttcattgttttctgatgtaacaaaatgttttagactcatcttgtatatttactgtcccaaatatcaaatcagtgtttactccaaaaaagcccgtgtttcttttagtaggaaacggtatttagagaccatactctaaatcctgtagatcaggggtctccaacccccgggccatggaccagtaccagtccgcggcctgttgagaaccgggctgcacagcaggaggtgaacagcaggtgagtaagcgaagctttttctgtatttgcagccaatccccattgctcatattactgcctgagctccgcctcctgtcagatcagtggtggcattatattctcctaggagcctgaaccctattgtaactgcacatgccggtgatccaggttgtttgctccttatgagaatctaatgcctgacgatctgtcactgtctcccatcacccccagatgggaccatctagttgcaggaaaacaagttcagggctcccactgattctacattatggtgagttgtataattgttttattaaatattataatataatagaaataaaatgcacaataaatgtaatgcgtttgaatcaccccgaaaccatccctaacccccttgatctgtggaaaaataatcttttatgaaaccagtccccagtgccaaaaaggttggggaccactgctgtagatgctcagagctacttggccttatcattagtcgaatctagaaaattgtgtaccaaaagaactgatatcaccggtttatactgttattttcaactcaaagttaatattacatggttttacttaatttatgttatattatatttgtatttattttctcttatgctgaaaattttggttccaaatatcctcagtataatgacatatatatatatataaaagcatatgtatgtacatatttctctctatatatgaaataatatatcctctctatatgtaatagtatactgatatatatataaaatatactaatgcaaatacacatgtaatagtatattaggagtataatatatagatacatatagttttataagaataatagtgatgttattaatactataaaaacaacttaagatttaactacagtttcttttgttcttaagataaattctactagagatgtacagttaaatcgcagagttttaaaaccactgtaattaattccccttagtgtaattaaaccaccaactcgatgcatagttagctcaatgcaccaataagcttatgggcttattagttttattttgctttctacttagtgattgctatttttaagcatatgtaacactaaccttatggttcaaagtcaagtgtataaaacaagatgcattcagagaagtatgactcttattctgtctccaacctgacttttattctctcttctaccttccatctatagagaaccattttaattcaatttttatccttctactgctttttaataatttagccatagatattcataatccccggttaggcaaaaggtgtgggactaaacacactgttctgcatctggcgccacaacttttgaaagtaaaactccctaggcttgggaaatagaccattatttactttcttactgtagacctatcagtcgttctatcagaaaagggtcagtcctgcaaaaatgggaaaccagaatcctctttagattttagatttttcaggggtgtgtttgtgactcacactgtgatgatattaatgttttactcattataattccagtataccaccccaaaatcccccaaaacaaacaacagtcataattaattgtatgcactgattttggacatactgctttattttcagccagatggtttgccaaaaaaatatttttctatgttactatgtgataattataaacatggttttaatagtaattgatgttccagtaagtgcacatactataacttgcttaccatatttcattgaagggcatttggttggtttctaactttttgttatatgatagtttaaaacactaatttctctttgctcaagagccctgaagctttgaactgatggggactgacaccatttagctaaaagatatcttgttcttactttcctggggtcctttttttgaggggtggaagtgtgaggaaacatggagatcttctcaacccaaagaaagccttttactcaacaatttcaagagaagaaaaatatgcaaagtacaaaagatgaagatagaagggaaaatcgccttttatattaggttaaatttttgagatagggtcttgctctgtcacccaggtgggagtgcagtggcacgatcacagctcactgcagcctcaacctcctgggctcgattaattatcttaccttagcctccaagtctaggtccacaagcacacaccaccatgtctggctaattttaaaattttttgtagagatggggtcttgcaatgttgttgagactggccttgaactcctgagctaaagtgatccttctgcctaggcctcccaaagtgttgggattacaggtatgagccactgtgcctggcctgaggctgtttaaaagaacaaaaatctttataaaaagtttcattgctgtttcttttctaaaataagttgtctataccagtggcatgcaaaatgtatcatatcagatttaatatgtgaataatgagggaaactgtgactttggacagaagactgtcgtagactgctctagtagaacagaatcttagctaatcaccatgcagatcccctgggttttagagttcatactgatcctcaactgggggctaacaatggtttctcatttatcattttcccctgcttgttcagcattctacttgaagccacagagaatgatggagcttacatatttcctttgataagatgaagaaatgaaaacatacattaatgaaaaataattccagaggttttttggactataggagttaagaggagctgaccagtgagcctgtggttgtccatgaaggttctgtggggtagagtttgaactgtccctatccagaatagtaggagggacagagatgcttatgagtgaaggccgcagaacaaggatggcatgacttgttcatggggctggggagaaccagtctgaccagacagaaagggttattgtggtttgacggtcggtgaaggttgttaggtggcctttggccacataagagagtgttagaaggtagacagattattttaagtgtgatgaaacaagtagcagttggtatgtagagaagtggggagaggtttgatgaaaagcagtgtgttagaaagacggttggcaacactattaagagtagattaaaaaggaaaaggaatgtgaaattagagagaccagaaaggaacctattatgataataaagtcatgattccatggaaagctgaccagaatgatgatactattagagaagagagaggagaagtaaggccaattttttctttaattaatgagtcttagtgactgaatgtgggaaataacagagtagtgattccaggattttaagcgtcggtgattgtgagaatgggcaatgcaaagtattgattaaatcagcagcattagggttgggaactagattagaatgggagggggatgatatagtgaattcctccctccctccctctctgccttcctccttacctttctccttccctctttcttttcttccttcccttcctctcttccttccttctcccctttatttcttcttatctttacatcattatttacttttacatttagcaactattctattccctggagctctggtaccaataaacaaaagaaacaccatcttcgctctcttgaagcttacatttcattaagcagagtggcagataaaagaacaagataactcagatagtcatggtgctacaaagaaaataaaataggcttatgtgctagctggtgattgaggctgcagggactggacagtactactttagactggagcttctggaaagcgacttaggggaaacactcaggtgtcagccatgtgaagatctggtgacatttcaggtcattgcaggcagaaaaaaacaaatacgcaaagataagaacagccttggagcgtgtgaagaacaaaatgaaagctgagggcatgggagggtacatcgtaagagcaaggaggtgaggccaaagtgtgtttcagtcaaggacagatcaggacacagaaaccacctagtaatttaaacagggatggtctaatacaaataattattaattttaacagagaactggagtcatgagggattcaccagtaggaagtaaagacaagtctaaaaaatgtaagagcagcagatatatgaagcagctaccacccataggactgagatacagggtttcctgcccccaagataagaccagacctggttagagacagcatgaccatggcaaactggatagccaagaagtcagtgtcatgctgcagcagtgtaacctgctggaagtgccttctggaagaactttctgaaagttcttcatcaccctccatgatgccaaggaaagctgttcatagggagttgtttcaccagtggcaatctgctacgaaaagggcttctgggaaatgctggcatccagatgctggggaagctgcccagacagtagaagctgaattctggggaagctgtatgcttgcaggagtcagggggtgcagaagctgagtgctggagaagccactgtatcacaggagctgggtgcagaggaaacaacgcgtgcttcagaggctgggtgctagaggcctgtgcatgttgtaggagcagggtctagagaagccatctgcgtttcaggagctggctgagaacacactgatatgggcccgggggtggggtgggggtgggggtggggggaggtagaggagtggcagggagggaggtagtgggtggggcagtaggggagagggggttggggggttggggggaagggttgggggttggggggagggggtggaggtggggtgggaccctttcctcctgcaaggcctttctagctccctctactgacaaaacttaatactgtgtcagctagcaaagaaaatacctaaagggatcagctaaatttttgctgagcagtcaatgtacatttggagctgagaggcaataaactggcatagagaagtagcaatggctctgatctctgagggcctcgcagtcgtgttgatgattgtattcatttagatgctggttgtggttagtgcttgacattttaactaattttttcttccaattccaatgaaatagataattttattattcccactttacagacaagaaaactgaggctgagggaggttaaatcgcttgtccacaatcacatgctagtgcggcatggggccaggattcaaacatgagcagtcagtctaactccaaatctgcccccagactccataaagtcattactgatctttgaacagacagataaatgtatcaggaaagataaatacttaaaataactttgcagtcagtccttctgtaattaaatcagccacctctattttacagattttatgaatttagaaattttagttacttttaaagtaaagtacaagtttaccaggaagtacaaattaaaataaaacgtggagaatacaacacctttcaaaggaaagtagagaaattggatgattgaggtaattagaaaataatattttgagtatagtttgatggatttcaggcttcttcagcttgacaaaaacagaaaagagggggaaagttcaaaaatattattatggatttgaagagatgtcactcagaagatcttgataaaatgttcctcatccctagtggatggggggcgtgggtggcagggtacaaaacgaaacatggaaccagtgatgggcttttaggaaattctatatggagcttttaccatgcaccagacctcaggctggggaccaggggtacaaggatgagtaaggcatctggccttcccttaaggagcttgttgtctcatggctgggacatgataaggacattactacagacatacatgaagagctaaaggaataatatatggaggaagaactagttctgcccaagggggaagtcaagggaaggtaccaagaaagtatagcatttgagttggatgaagaactggccaagacagctgaggaaagggagatgtagattaggggccgacacaagtaaggggttggcaaggacatgaactgaacggggtttgaggaaaaagcttagcacggggtcaagaacgtagattttggggttagagtacctaattctggcctcctcaatattttctagtttcatgatcttggtcaaattatttaatctctctaaatttcaatttctctgtctatacaagaaaataaagtaggccggccatggtggctcacgcttgtaatcccagcactttgggaggccaaggtgggtgggtcacctgaggtcagaagttcgagaccagcctggccaacatggtgaaaccccatctctactaaaaatacaaaaaaaatattagccaggcatggtggtgcatgcctgtaatcccagctacttgggaggctgaggtaggagaattgcttgaacctggaaggcggaggttgtagtgagctgagattgtgccattgcactccaacctgggcaacaagagtgaaactccatccccccacccaccaaaaaaaaaaaaaaaaaaagaaagaaaataaagtagtacccccttcagtgtgttattatgcagactgaatggtatgaaaagcatgttttcaccattactggcacatgctcagttaacgttttcctgccattcgtagcagcaggatgaggagtattgaaaaggctaaagattagagttctgggaagaataataaggattagatgtcagaaagtgtgtcatgacatatttgtgtgtatgcgtgtgggtacacagaattttgaaatagttttcaattgaagcctttgtttgtaaccagtagcacagggagatgttcagttttgcacataataatgaatatctgttatgtctgttagccatttgtaactactattgttgtttctgtcatctccagtaaagtgtttctgtattttcacaaaaatgagcaagacctaccacaaaaaattatcaggtaagggtgactttatgggtcccctgctgtgtatttgacaccaaaatgactcatcacatgagttcctaagtgctatgtttggtttcagtgtagaataggagattgtgtttcccaggtagaaaaggagactttgaaatctttctcataaaatgcgtgaaaatctggtgccatcagatcatgagtcttgtcatcaggatgggactcactcttggatccatcaaccagctagctaggtaactctgagcaaataccagatgctcttcagcctgtgtcctgatctgtaaagttgagatcataatagtaatacttcacagtgaaattgtacactagaatgaaagaatgcataaaaagtgcctcgtaccctgccacgcacagagagggtgatacacatcggtcccctcatccagcatcttctaattcacccctccctgtccccagcttctcctgtctggggatctcaagttgggaatggtcatctttggatgaagctgccatgtttatgtggacttagaggcagatattctattgggaattcaatggatgcataaggcagtgtaggggaactgatttttagggagcaatatgaagtcagagaaattgcactcttatctctacttacgttcctcatggtcccttttattcttttatgacaaatgttacttcaagctacagtagtgttttcaccaggggctgaaggaattgatggagttgttttctttagaatgagccgtaacatccctttgttcacagagattgtaaatcctgcatctttcagattagatcatgtatgttcaatatcagtaggaaacaaacagagaagtaaatatttgctacaaaatgtctttctgctgccttgaaaatgagtttcctaaatctgacatgtcagttaccctgcttcatctgtttcacatttagagtcaaaggaaaacaatcccccacagcaaggagcctgtcacttcacttggtgtatccagtgaagataatgtgaccacagtgcagtgggattgaatactgataaggatgtggcgggccatgcttaaagtttggtgtctcattcaaatgactggctgagagatgaaaagaaaacaaaaattaatccccctcctggaaccttatactgattcacttagtggttggttgctgctctaaggtctgtctccttttccccccattaataatcataatcaaatagccattattggtttttggcaacagggtaattactttctcgtccttattttctgggacagtcggtctgttcatgagaaagggcggttgtgcaatcgttctccctacgtcaactctgagaagtcggttgtgccctgcagatattgatgtcagcctgtttgctctctggtggagtgaaagaagaaaataattttattgtgctatttttagacttcaatttagattgcagcctttatgatactttgtgtactggggatagaactgttgatgcagaattcagctgtgagatgctctaggttctacctgcccctgaaagatttttttcgcttagcctgaatgccttagaactattcagtcacattgccttcatcgtcagctgaaagctgagccatgacaatagggttaagatgcactttgtattgacagtgtttgccgatggaacttgctgccagcagtctccaagtctgcaatttgcctgtaaaggcctaatctgatcttttatatgcataaataatcagcaccatacaaattctctatgaacaaaatgagtttattgaccattcttgcttttctaaatagttttccagaggtgatagatgaaagccagacaagaaaaaaatatttctttgctggatttccttctgaacaaacaagaaggacccaggtacctgggactccaggtatctttttctcagctgggatggaaggccatggactaaagcagtcttcctagttctttggtattagcaatgagctggtcttaaacttcaaagggatctaagaaagtgccagtaatacctgtctgagcttgttttgtgacgtgtatgttaccacatgtattaaaattcagatcaatttgcatctaaattatatgagtgcatgtgacttggcaatccagaagctgtcaattttagtttataagaacctcaacttgggcctggtatggtggcttacacctgtaatcccagcactttaggaggctggagcaggtggatttgaggtcaggagttcaagagcagcctgaccaatatggtgaaaccccgtccctactaaaaataccaaaattagccgggtgtggtgacgtgtgcctgtagtcccagctactcaggaggctgaggcaagagaatcacttgaacctgggaggcagaggttacagcgagccgagatcgcgccactgcactccagcctgggcgacagagtgagaccctgtctcaaataaaaaagaaccgcaacttggtccttgctactccaagtgtggactgcagaccgacaacattgacatcacatgggtgtatttaaaaatgcagaatctcaggcacttccccaacctacaaatcagcacctgccttttaataatattccccaagtgattcataggcacgttaattattttttaagtcacaaatctttttaaaaatctactatgatctgaatgtttatgtctccctcaaattcatatatttggacctaatccccagtgcaatgatgttaagaagtggcacctttggtggtgattaggtcacgagggtggagccctcacgagtgctgattagcgcctgtataaaagagggcccagggggctcccatattcctttcaccgtgttaggatacagcaagaaggcaccacctgcaagaaattgggaacttaccagacatcaaatttgctgtccccttgatcttggactccccacccttcagaactgtgagaaataaatttcttttgtttataagccacccagtttatggcatttttattatagcaactggaacagactaagacagaatcccataaaatctgtggaacctcttcccataaaaatgtacctacacacacaatttgtatataatttcaatggtgcaagttccgtggacttcaatgacacttccattcattggaagcagagagcatgcctgagggagcccccaagtgccatgtgccccgaacaatgctgacccatactgctccttgattgtcacattgaccaggtcttcaccttcatgcccagaccttgtctatgtaagcagcaccagcctctggggtgtcccatgtcagcctcagcagtccctttcatccatgtggctctcattaaccagtccttgctatcattttccttgcctggctactctggtcttttgctttctccttccccagtttagggactggtgggtacaaacattttagaatgaccatgaagtaatatcagttagctgaaacatatctatcaagattctttcctacccaggtcaggctcataaacagatgagatggagaaaataggtcttcctgctgtttcagctgacggtccacccatgctgcaggtcctgctggaagttcacttctgtgttctggtctgtgctttgatttcttctaatctttggtgatggcataaagataacgcaatgcaggctaaagaaaaccctttaagaaatctgttcacttactggcggatttgcttatcataggcatgccctgaccttgaagagtccttgctctggtagggaagcgcatgtacatggatgattaaaataaatgcttcatgtcaaaatacaggtacagaatgctattttgctacgaaggaaagaataactagcttttccaagaggagtgagggagagcatcaaagagagctggcttttaagggataaagcagacattgcctgagataagagctatagaattgcttattgtgagaaactacagagttgggaagatcgagatgagacaggcatatgagcagaagtgagagacctggcaggaataagagctagcacttagaccctgcttgctgtagggcgtgcacaggtctaagtgctttatatcaagtacctgtgcagttctctccacagtccaacaatccttccattatggatgaggaaacacatgcgcaccgagttcagtatcttacctaacgctgtgcgactgcaagcggtggagctgggctttgaacctatgcagtctggcttctacactacacttccaggcagagggcatctccctgtgcttctgggataaaacttgcagcactgccttgtctaggactcaagaggcactgttttctcctcccctactggttctgcagtctttccaactctttccacttcatcaatgagccatgtccatcctcacatcactatgtgtctgtgtaatacttagggccactgagttatggggaaaaagagaaatggatatttcttagtattgtctggtggttctgttatctcacagttcatggaaaccagatcactacaggcacaaggcattaccatcagtctcagagaaggcctgacaccctgttatagatcagagagtcctggccaccactaaaggtcttggaaagacacggggaaggcaagcagaagcacaggtggcctgaagacatctccttccggccaagagtccccctgctcatcccccaccccacccaggcaccaccctccacagctaaaggtgtttatgctgtaggaaccctgtggtggtaggagatcgggggtgatagggctgcttggataggaaacatatgtgattgttggcactgctcttcatactgttgtcaaattcctcactgcttctgtgtacttggggtgacagtctgacagcctgtgaggtcagacaaagcccagattacttccctctcgcctttccgtctcgcacttgtgggctgccattcttaaaggagtcacgtgtgggctttctttgccagaagtaggcatggcttacatcttttgggtttgggcactggaaatgactctgcttcccctgcagacacaccctgatgaggctgcaggccactagctctgctcctttttcaacatcagaaacagaggctgaccattgctgggacatttcccttctcctgctcctaactttgtcatagacgtctcctgaactgcagttactgtgtttggaggtaacatcatccccttctttggtttgtgggtagggaataccagatacgagggagagcatccctaaggccttcacctgacaccagtcctgcctgtatgtcctgcagttctcatggtaagccatcagcctcgccaggcggcacctgtgtgccaagcagcatggcttattcattgtcttctctagaacacagaatagtttggggacatttctatgttttctttctccaacagccagatatatgtgtccacttagctgcacataattattgtctctctaactctttgacctacacatttgtcagataaaatattttgggtgagagcttgttagcagatctatttccattccactcttggcatttattagcgagccctcttcgggaagccgtatgttctgagaagtaggaagaataacgcattttacctatagtgcaatgtctggccagcgcctattctttctgggttgagctgctggaatgtattcaggggataagctgagaggcaatttacgaggagtgctctctccttgtcttgctcctgcttccctttaaaattccttggctgcccttagtgtggcatgtgtttccatttatcctatagttctcaagactcaatggagctcttgtacttctgaagggcacttactaggaagcccttctccctgacgttgagcttgcactgatcaaaacggggggccccacaaaccatcacagggatatctatgcaaagagggaatgtttagcaccaaagttaaggactgtgcatgctttggcagaattacaaaaggaaaaataagtggacaaagtatgttactttttttttattattatagggtgtgtgtggtttatttgaacatcaacaaaaacacaacagaaaggggtaaaatgtaaaggaaaagcccctttgctgtcctccaaccctgaggaagctgttagcagttttaagtgcatccttccagaaatatctccctcatgtatggacatatatgtcctttagttagttttagaaaattcaaatggaatcataacagaattttgttctgtgccttgccgtttttgcttaatttttcttggaggtctttcaactttaagaggtaaaaatggctgtatgatatgtaacaataagtgtggctgattccaattttctccatttggttgtttccagttatttctcatgctgcaatgatcatccttttttatatgtctcttttaccttgtctgaatattcctgtagagtaaatgcctagaagaggaatagctagtgaaaaggacatgtgcattttaaattttgaccaatattgctgaattactttcctaaaaaaggcagctgacgtatccctcacctttaaaacagcaaactatacaactctcagacctttgtctccgaatctgtgcatctttatattggatgcaaatcacgtgttgattggctggttttttttcttcctctgccttttttgcttattttcttttgggatatttgcttttttacttcttgactttcaaaactctttgctggttaataaatctaactcatagaccatgcaacgtgttagaaatatttttttctaatatgtcatttgtattttgactttcatttatggcacgtttgccacataagagtttaaattgatatgggtctaaatttttcactgtttttcacttttggatttcaggtttgtgtttgcttagaaagtttttccccacttcgagtcagtcaaataatgtaaaaattttcatttagctattgggcagcttagaagccaatactagactggccaaatagagtggcatgttgagacttaccctgagattttagtttttaatgcagcgaatccattgggatcacttataaaaaaggattttaccctattaatctttactagaatggatatttttaaacttaatttttttgtgcttctcattgtaggagtcctttgaatgtagcttccctgagtgttcattcagttcattagttattgagttcttatagtggatgacatcttgctagtctataggcttcatagggttttaaaaaatgaatacgaaatattcccaaacctgattaattacatacagtagaagagggcgtctgtagacaaaacccagagatcaaggcagaatgtaacaactctcttgagagtactacaaaatgccatgtggttcagagaaaggacatcacatatggttgtgaggtcagggaagaattttatattaaagtgacatgagccttgagatgggccttgatgaaatggttggatttcaatgggtgtggattttagagaaagggcataagaagtatgcatctgtaattagaaacctgtgcatttgttctgggaagagtgagaggtccactttgcaggtgtgtggagaactcacaggggtgcaatgaatgagtccagagtagggctgagggcatcttgggaaaggcctctgagaattttactctccatttgaaaaggaataagaggcattcacgtttttggagcaatactagatgggatagattggaagtatgaaatatttgaaggcagaaaggcccatcactaattgtagttttcctggagtaaagaaataaaatgcttaatgtggagtagtactggaaatggggaaaagcagacctgaacaatattctcagtttataatctgtaagagggtactggggctgaggaaaataacaagtttaaaaatgaccaagatttctagccttcatttggttcactctcttaacatgcattgagttcttgctttatgtcagcactgctctgggcgcttggactagaggagttgaggagttggcacgagacaggatccctgctctcaaggggccacagaaaacaaacaggccaggatgatggcaggtataaggaaaccatgaaaaaaaatggagaaattaagaagaagggcttgtttgatggggagccctgataactttgattctgtgtcttaaaacttcaattcatgcttcatataattatcaatttaattattgctggtggtgttctctttctctcttcaccctggtatactacggagtgatacaggaaaataaattgttattcgaattttaaataggctgcaaagttggaaagcactttaaaatctgaggctggttggcttatccacaacaggaaagggaagtatgttacactaatgatgagaatagatctttgatttctgattatatcttagtttcttcacctgtgaaatagagacctgtcctaaaacagtccttgtactttgctcacagtttggtgagtcataaatttgggaaggtcttgcctgggcatttctctgcacgggcctgcaccagggctgaacgtgcacaatggctcactggtgtggctggcaatggcaacagctgtcagctgggatcccagagggggccactgaccaggcatgtagtccctccagcatgacagtcttgggctagatagactccttgcatgacagctggcttgtctcagagcaagtgtcccagaagaaccaggtggaagctacagggcctttccctaccttgccttggaagttagatggcattactccctctctgttctattgattactccaaggaaggcaccaaggtcagcccagattcaagagaggaggatatagataccagctctttattataggaatgtcaaaagagtaaaggttatgtttttaaaacactacaatgtagcaataccatcttacctcatgaggttgtcttgaagactaaatgaagtaatatatgtacaacccttagaacagcacctgaccaaaaattattaacaatggtgatgatggtggtgctgggagtggggatggggatgaggatgatgaggatgatgatgagtagctgcactgcctttctgcaaaatgtcccttgttgtctggcaggttgagttttggaaagaatggttttacctaatttatatttcctataactatgaaggggattgtcatcggttaattgccttaatctcatcaccttctaactaacaatccagggaggggttgctatccattgtgttctaagggagacctgaatataaactaaattctattaggaagggcaagacaagaaagagagggtagtttcaaccaacaatgacctctacatgttcctcgttaaatactctttcttatattacatttcttcctttcatattatgaaatggcattggagaagaagactaaaatttccaaaagttcagtggaaaatagtattactttttctttcttagaaaatagaagacaaaggaataaaatttaaacatgtctaataacaacattttttttttctgaattggaggttaagttgcccagggaaaaacatgcctacagacacatgaggactattctaccttcatcagtttgcagtggaaaatttagtactattggccattcacatatcagatattttacaccatcatataaaaagacctggttattttctttttttctttttttatttattttattttattattattatactttaagttttaggatacatgtgcacaatgtgcaggttagttacatatgtatacatgtgccatgctggtgtgctgcacccattaactcgtcatttagcattaggtatatctcctaatgctatccctcccccctatccccaccccacaacagtccccagagtgtgatgttccccttcctgtgtccatgtgttctcattgttcaattcccacctatgagtgagaacatgcggtgtttggttttttgtccttgcaatagtttactgagaatggtgatttccaatttcatccatgtccctacaaaggacatgaactcatcattttttatggctgcatagtattccatggtgtatatgtgccacattttcttaatccagtctatcattgttggacatttgggttggttccaagtctttgctattgtgaatagtgccgcaataaacatacgtgtgcatgtgtctttatagcagcatgatttatagtcctttgggtatatacccagtaatgggatggctgggtcaaatggtatttccagttctagatccctgaggaatcgccacactgacttccacaatggttgaactagtttacagtcccaccaacagtgtaaaagtgttcctatttctccacatcctctccagtacctgtttttccctgactttttaatgattgccattctaactggtgtgagatggtatctcatcgtggttttgatttgcatttctctgatggccagtgatgatgagcgttttttcatgtgtcttttggctgcataaatgtcttcttttgagaagtgtctgttcatatccttcgtccactttttgatggggttgtttgtttttttcttgtaaatttgtttgtgttcattgtagattctggatattagccatttgtcagatgagtaggttgcgaaaattttctcccattttgtaggttgcctgttcactctgatggtagcttcttttgctgtgcagaagctctttagtttaattagatcccatttgtcaattttgtcttttgttgccattgcttttggtgttttggacatgaagtccttgcccatgcctgtgtcctgaatggtaatgcctaggttctcttctagggtttttttggttttaaggacctggttattttcaaagcttccaagaaatggagtaaaatactaatgccctttaagtgaacatattaataaatcaggaaagagagtttggttataagagctgaaactctaggcatctgtgtcagaactcagtatttactctcctaaaatggatagaaacctacaaactcactgcctaccctctcccagagcaccattccccatagaaaaccccatagaaaaacactaacatgcctgggtctcaggaggattcaagccacactcagatgatctcctagaccccattttacttccaactggcaggaatcacaggaatggtgaatatcaattctgttctcaagaacttacccccaaacactgaaattgtatctgctagctgcctcattactggttgtgaaaacatcaccaaagatcttgcacagttcaagtagctgtgagtccttctcttcaataattattactaatgatctaattgttttccctgggcagaaatagcaaagcttctgaagacttcaaaatcaaccactactctctttagcacaaacagatcaataagcaggtatcttaaaaatccaaagcttgatgaaattattatgtattatgaaattacactgtaattttaccactacatattttcctcagcactcagcatagcatcccctcaaactggcttccaaactttgacgtgtgcattctaagagaagtttggggactaccctcactcagggtgcacatactctgtcccatcaaatagcaaatagacacaaagttacagtattccagtcattatactgcagaaaattatttacagaagcagcaaacctttcttaggaaagttataagctaggctgctggctctttcctttgaatccagcctcgctcacaccgtagaagccagagcaatgttgatggatctgtcaagttcataataaaaaataacagagaactcctcaggtaactgaaggtgatttggcccacgtgtggggagaaaacagatgacagcgtggagggggcttttcagacatgaccttttcttcctccttcacattgctgaggaaggccaatcctacctaggtgcttcaagaaacaaacccctgctggcagtgaggctcggggttttgaggctagacaagcagtagcagaggagcactgcctgggagggggtcaagcagatggccaggatttcagcatctccatcctccctgttccccaaggggtaggtaattacaattgagggagactatatttctgggagcacagatgattcccccagaggctcttttccctgcaccctcctaccacctgaacccactgggacctgcacaagtgagggccttggcagtatccacttctccaaagacccaagaccagcctaagtagtaaatatgcctaaggaaataagaactcatttggaaaataaacaagactgctttggaggacaactgttaaaaaagaacggtaataaatggaatggctaaaacctgatgaagcatggttattgaagtagacatacaaggtgttcaacacacatatcaaatattccccaaagataaggaaggatgttggaaacatgacataaaacatgaagccctaaaaaggagtcaaatggaaaatcaaagaatgcaaagtttaattattttaagtttcagtaaatgcattgaatgccaagtggattcagctgaaaagccaattggcgagccagaagatctcagaaattctcagaggacaccagcaatagtcagagagagggaaaacttaaaagataaatgaaacaatatgaagaatagcaatatgaagatcaacattcatataaaaagaatcccagaaggaaggaaaacaatcaatagaaaaatggaaggaaacatatgagagaaagattgagaaccgcccagaaaaaggaaaaggtataaaacttccgaccaatgggcttagtagagtgcaaaacaggatagaaaaaaaggtgatgggcatacctcaataggttgtaataacatttatgtaaaacaatgatagagagaacattctaagagcaggtcaattattaaaggatgagaactagatcgacctcagacttctcaatagaacacataatacaagaggctatcaagtaatattttcaaaatgtggaaccaagaatattaaataaaaccattatttaaatgggactatgagacctggaaatacttaaaagatttatcatgcacaagcttcttgggaatattcttagaggaagtatttcaagaagatgaaaagtctaggaggacagtatgagtggtgtcacagagtatgcaaataaagcttagcaaattttttactgttgatgacatacagaacttacaaatagaacaaacaacaaaaatatattttaataaaaatctggaactaaaatatagcctcaaaatatatatatcaatttattgcttcagcggtgggatggggtagaatgagagtgaggtgaaaatacattaaagcacttttcttcttgtttgcgaggaagatgtagaaattgaaaagctcagcaaatttatatggaaaaacataaatatgatcttacagatacaaaggaaactaccagaagacaaaaatataatgtataatttttagaccaatagaagaagatttgatccacccaatggaaagtaggaaaagagaaaaaaaataaaatgtttaaaaagtaagggaggattcctggtctgggaaaaaaggcatggaccatttctctctgcttcttcccactaaatgcaattctaaatcctgaaaataatgcaagagctaatcaaatgagaactctgaaagaccgtgagaggacagaaatctgccttgggactgcaggactagagagaaaacatagcttcagggcttcctacatacctacttcatgaaaaaagatgacctagacctggatttcctgacctccaaccaagcaaccaaaggcagctcagctaggtttattcctgccctggatttggagccctgctaacaataagcagccaggggagagctctccttccctcctggcctccaactcccttcccctcccagagacacctggttagccaggagcccctggcaagagggaccctgccacaacagatgcccagcctgggaagtgttctcctctcccctccctgccccaccaggggcaaggggaattctgccacagtaggtacccagccagggaagtcttcttgtcctccagagtctgagactttacacccgcaccaagagacattcagttacctgacctggggggaggccccttctgccttctgccccttcagctagcaccatcagggaccagtggaagttctcctagagccagatgaatcaagcagaaaaacaacaacaacaacaacaacaacaacaacaacaaaacaaccaactccaaaacaaaactcgaaggcaaacaaatgaaaggaaccacactgcaatggcttcaaaaataaaaattccattggaaccacatatagaaaagtaggacgggacctgcatgataaagctaaacagaattccctcataaaataaaaaaattaaatggaactcaacgttttttaacataatgacccacatgcccaagatataattaggaaccattcatcataacaaaaaccaaggatatcacagcttggatgaggaaagagaatcaaccgataccagcggggagatgaatcagatgttggaattatgtgacaagaattgtgtatggtcatcatgaaaatgcttcattaaactattacaacaaatgaaaaaattagaaaaggtcagcaaagatatagaaatttttttaaaaaccaaatgtaaattatagaactaaaaatacaaaaacagaaataaaaatctcactgcataggctcaattgtagagtgaaggtgatggagaatagattcagtgaaattgagaacagattaatagaatttacccaatctgaacaagaaacaatggactgaaaaaaatgaacagagcctctgggctctgtgggacatagcaaaagatccaccatttatatcactggattctaaaaggagaaaaggagagtgaggctaaagaatatttgaagaaacaatggctaaaagctccccaaatttggtgaaagccataatcctacagattcaagaagctacacaaatccccaggagaataaataaaaataaatccacactaagacacataagaattgaatttctgaaaactaaagacaaggaaaaatccttgagaacacccagagagatttactacctatagggaaacaaaatttcaataacagtgaatttatcatctgaaactatggaagccagaaagaagtggcacaattatcaaatgataatagaaaagaactgtcaacctacaatcctacatccagcaaaattatcctttaagaatgaaaaggaaataaatatattcccagatgaagaaaactaccgtgtatttgttgttagcagattaaagattagctagatgaaattctctgggaggtacagaaaggaatatagaataaaaagagtagaaacacagtagaatatcctttacctcatgtgttttatgtattgtattatggtgattgagacaaaaattttaatgtcatctgatacttaagacaatagtattttattttattttatttttgagatagagtctcactctcacccaggctggagtgcagtggcgtgatcttggttcaccgcaacctccaattcccaggttcaagtgattcccctgtctcagcctcctgagtagctggaactacaagcatgtgccactgtgtccagctaatttttgcatttttagtagagatggggtttcaccatattggtcaggctggtctccaactcctgacctcaggtgatccacctgcctcaccctcccaaagtgctgggattacacacgtgagccaccacaccaggcaataatattttaaagtgcagaaggtagagattgaaatggaagggaggtttatttgcatacttaaagtagtaaaatattggtgccagttgatggtgatgccaccagcatattgtaatacacagagcaattattatgcaaaatatacaaagagatataatccaacatattataaataaattgagatgaaaccctaaaaataggtccataaaaatatgctcaaatgatttttggcgaaggtataaaagtaattcagtgaaggaacaatagaatttttaacaaatggagctggagctattgaacattcatagggaaaaagatgaactcaaactaagtctcatacttcatgcaaaaattaacttaaaatggatcaaggacctaattgtaaaatataaaactataaaacttttaggaaaaaaaaaggagtcagtctttgagacctaaggcaaggcaaagatttccaagactcgacattagaagcacaatcaagtaaaaggaaacattgataaactgaacctctttgaagtaaaaccttttgctctgtaaagattcatgtgaagaagatgaaaagacaaactagtgactgggagacatgtttgtaaccatatatatctgacaaagtattagtatgtacaatgtacaaagtctcaaaacccaacactaaaaaatattgagtagaaaagaagcaaaagacataaaatacacctcactgaagaggctatatggatggcaaagaagcacgtgaaaagatagtcaacatcattagaaatgagggtaatggaaattgaagctgcaatgagataacattacacacctctcagaatggcaaaaacaaaaaaaaattataacaccaaatattggtgaggatgcagagaaacaagatcactcatgcatttttgataagaatgcaaatggttggccactctgaaaaacagtttggcagtttcttataaaactaaacatgtaactatgatacaacccagcaattgtgctgttggacaatcatttcagaaaaatgaaaatttaatttcacacaaacacctatgcacagatgttcatagcatcttttattcataatatccccacactaggagtatccgagatgtctttctgtgggtgaatggttaaacacactgtggtacatacctagcatggaatactactcagcagttgaaaaggaataaacaattgatacacgaatctccagggaattatgctgagcacacacacacacacacacacacacacacacacacacacacacaaaagccaatcccttaaggtatctactttatgattctgtttatacaacgtttttgaaatgacaacattttaaaaagtagtaacagacttagtggtctccagggactagagagggggaggcatgggacgtaggcaggtgtggttataaaagagaacatggagattcatgtgataattgaattgttctgtatcttgaatgtggtaaggggtacctgaacttacataagtgataaaatcacataaaactatgaaaacacacacacaaggggaactctgacgaagatcagtggattttatcaatgtcaatactctggcatgatattgcactactgttttgcaaagtgttaccattatgaagaactgggtaaaggtacatgagatctctctatactctttcttacaattgtatgtgaatttaataaaaagaaaaagaaaaatagaaaaaaagaagggaatttttttaattgaaagacttggctaaaatcaatgagaaaacaccaataattacacagtaatgagagtacatgggttaaaaccagcaatccaaagataaaatcttagaatgggttttatacaattcagcaaatgttttatgttggagtcattttaaaaatatgcaaataaactgaaaacatagaatggtaaaaagataagctgggtaaatttgaattaaaagagtgttggaataacaattttagtatcagacaatttaggctttaaggctaaaatatcatcaacaatgaaaattgtcacatacagaaaagaagcagttagaaaatttaatgattggaacccctaggtatctaacatcataatctgagactcataaaacaaccaataaaactatgggaggaaatagaagaatcaagaattatagttggaaatttaaaacactcatttcagaaactcatagatgaagcaaacaacaagaaaaacaaatatataaagattttaataacataatatgccttcactttccattcagtgaacacaatgctcattctttttggacatatatggaaaatttacaaaaatcaatgaagtactaggtgataggagaaccctcagataattttatagagttaattctcaaccagtatgcaataaaattagatattaatctaacaaaaagggaggtgaaaaaaatttattctatttagaaacgaaaaaacatatcactatacagcccttgaattaacaagggaaccattaggaaagataatgaaaaggctgtctgtcaaatctgctggacaacaatgctgtaaattctaaaaatatatataatgcaattacagaaaaatatttcaaattgatagattttgtgataggcccacaagtgtttgttaaattattttccatatttttctgtatatttaaaatatttaataattaaaaatttaaataaacatatattggacatggttaaaatattactcagacaaaaattaagagctttaaatatgcttattataacattaaaatttcaaaagaggaaaatatgaaaaagaaaacaaatgagttaagtgtttacagaagctaataaaaagtaagataataaatccaaagaaatggggaaaatggaaatataagataagaacaaatcaatgaaatagtgaacaaagatcaatatgaagattaacaaaggaaaaattagttctttgaaaggagtaataagatagcaaacctttgataagactgaataagataaatcagaaaaagaataagtaaaacacatactgaaaaggagatctacgaacaagtaattttttaaatactttttaaaaatatgaacaaacatgtaacaatacatttgaaattcattaaaaaaggattaatttatataaaggatataaaatattaaaatggcagaagaataaatggaaaacttgaatagaatgtaaaagttaaagatactgaagtggtaataaaatgtctccttcaacaaaacccttgggaaaatgatagggaacccgagaaagaagcaaataggcaatgaatatgaaaagataattcacagaatagtggagaaatacaacttcaaacgagatcccaccttttacctattagattggctaaaattaggaaaatgaaaaataccaaagtgcccccaactgaggactgttgtttctagtatggaccagaccccattcctgcactcctgctccagtgcatcgctcagaaaatctattccctccctccctcgctccatctctccctccctccctccctgcctccctccctccctcccttccttccttccttccttctttccttccttccttcttcccttccttccatccttcttcctttccttccttccttccttccttcttcccttccttccatccttcttctcttctttccttccttccttccctctctccctccctcactccctccctccatccttccttccttccttccctctctccctccctccctccctcctcccttcctcctttcctccttttcttattatattttctttctctttttgttattttatattggcatagacataaaatacatacatcatgaatgtactgcttgatgatttttcactcatggaatcctcaccatcaagaaataaaatacttcttgtacacaagaagtcccattatgcctctcacattatgagccaccatgcctagcctattttacttttatttttgaagaaaattcaaataattgcatagttctagattgccagttaatttctttcagcattttaaagatgttttattgtctcctagctttcaccacttctgtcatccatatttttgttcctttgaagttaatgtgcctttcttttctctcactgcttttaagagttttgttctgtctttgattttagaagtttcattatgatgggcctaggtatgtgttttctttgatcttttcctattttgagttgtagtgtttcctaaatgtgtggtttgatgttctttgtcaatacatgatattcttagctgataatctcttctaatattacttctgcctaattccttctttatccttccgatctcatcatttatggacatgggctttgagagaatgttaattaatatgtccaaaaaaatagggaacatgatggagaattttgacagagaactggaatatataaaagaaaatcaaattaaaagtatctgaaacttagaacacaatagtggattgaacagcagattcgagacagtagaaggaagggttattaaatggaagataggtctgtagaaaatatctagcatgaagctgtctggatgggagaaaatatatattttcattgaaaattcctgattttggttttccaaaaaaaagtcaaaattttgtcaacattgaatttacattcctcatagtttcagtgtgcctgagctgatgagttgttgatgtgctccatatacagggatatgtactcccaactagccacagtcactcctttctattatcttctaccactgaggctgaatattagttgtcatggtttatatcatcccttccctgctccacacatttacattgcgtgctgggcatgctatatatttgagttcatgatccatgttgaagatgccataaagacccaaaaatgtgaaagagacttggaaccgggtaacaggcagaggttggaactgtttggagggctcagaagaagacaggaagatgtgggaaagtttgtaacttcctagagacttgttgaatggctttgaccaaaatgctgatagtgatatggataatgaagtccaggctgaggtggtatcagatggagatgaggaacttgttgggaactggagcaaaggggactcttgttatgttttagcaaagagatgggcagcattttgccccagccctagagatctcgggaactttgaacttgagagaggtgatttagggtatctagtggaagaaatgtctaagcagcaaagcattcaagacgagacttgggtgctcttaaagcagtgcatttttatgcattcatgaagagatgatgtgtaattggaacttatgtttaaaagggaagcagggcataaaattttagaaaattcacagcctgatgatacagtagaaaagaaaattccattttctgaggagaaattcaagctggctgcagaaatttgcataagtaacaagcaaccaaatgttaatccccaagacaatggagaaaatgtctctagggcatgtcagaggtcttcatggcagcccctcccattacaggcctggagacctaggaggaaaatatggttttgtaggctgtgcccagggccttgcagctttgtgcagtctcaggacttggtgccctctgtcccacacatggctaaaaggggccaacgtacagctcagcctgttgcttcagagggtccaagccccaagccttggaggcttacatgtggtgttggacctgtgagtgcacagaagtcaagaattgaggtttgggaacctctgcctagatttcagaggatgtatggaaacgcctggatttccaggcagaagtttgctgcaggggtggagcactcatggagaacctctgctagagcagtgtggaagggaaatgtggggtcagagcccccacactgagtccccactggggcactgcctagtggagctgtgagaagagggccaccaaccttcagaccccagaatggtagatccactgatagcttgcaccatgcacctggaaaagctgcagacactcagtgctagcccgtgaaagcagccaggagggggactgtaccctgcaaagccataggggtggagctgtccaagaccataggaacccatctcttgcatcagcatgacctggttctgagacatggagtcaaaggagatcatttcagatctttaagatttgactgcccagctggaatttggagttgcgtggggcctgtagcccctttgttttggccagtttctcccatttgggatggagcatttatccaatgcctgtacccctaatgtatcttggaagtaactaacttgcttttgattttacaggctcctaggtggaagagacttactttgtctcagattagattttggacttggaattttgggctaatgctggaatggattaaaactttggggtactgttggaaaagcatgattggttttgaaatttgaaagggacttgagatttgagaggggctggggtgaaatgatatggttaggctttgtgtccccacccaaatttcatcttgaattgtaatccccataatccccaaatgttaagggagagaccaggtgtaggtaattgaatcatgggggcagtttccccagtgctgttcccaggatagtgagttctcatgagatctggtggctttataaagggctctttccccctgcgttctgcacttctccttcctgccaccatgtgaagaaggtgccttgcttccccttcaccttctgccatgattgtcagtttcttgaggcctccccagccacactgaactgtgagtcaattaaacctctttcctttgtaaattaacgagtcttgggcagttctttttagcagaatgaaaacagactaatacaatagagtctagcaatagagtggagaacaacatagttacaagctctgccctcagggaaaagaaaacaataatcacataaataattagaattgtcataaatactctgaaataaaagtaaaaaatgctaagagatccatcatattttccagttggaaggcagggaatgtttctcccaaaaaggttatttaagccgagttctgaagataatatgatttagtcagatgaaggcctggttatatgtgtgttgatggagaatggacagagagagttgatctagcctggaagagttggacaggtctgaggattcaaagcaagtcagtagggctggtaacacatatatgagcagaaactgtgttgtattgggctgctgagtctggaaaaatacataggattttggatgcctttgcagaccaagcagctaaggaccagcacatttcatggtgacttgatggtgtgcaaatttggtccctctgatgaatcttctagttgaaataatttatcactgtgaaattaagtcatcaagtataagatgaccagctgacttttagccaggtagacaagctatcgacttggtatgatgaaacatcactgagttcatttttatgcctttgtttcctctctgtctcagctgcaagtgtccactgcttgggaaagtgtgggaagctgacttggaagcttgtcgattgcttatccagagcctacagctccaggaagccaggggaagcctgtctgtagaagatgagaggcagatggatgacttagagggagctgctcctcctattccccccaggctccactccgaggataaaaggaagacccctttgaaggtattggaagaatggaagactcacctcatcccctctctgcactgtgctggaggtgaacagaaagaggtctgtccttttcacatggcctccagaggggacccttattctaaggggtgctttgggaccatgctccaaatgggaacaataaatattgggaaggcttcccattgagcatataaacttttaaaagtttcaataactcttgaatatgattacaaaataaagtagaatttttgtagaagtttgaaatatagaagagcaaaaaaacccaacttttggcatatttagttccattttcattctaatttagtggctagaattagaatatgcagtctaatatagaattaccatatatagcatacattatatatgtcatatataatatagttattatattcactatagattatatatgccatacatgatatttaacatatatactatacattatgtattgtatgtcatatatgatgtttatatatttagaatctatatattacaatatattattatttatttgaatgaaacattcaaatatatgtatttatcccattaattgtttttaccaaaaccagatcataatgaatgtttataatgttcttctttcataaacacaactaaagtttggcctgagatatatgtattacaaattaaaatatggttttatttaactttctttttctctcccctctttcctctctcccttccccttccactcctcactttcctcctcccaccctaacaagagtcttttccataaaaaggccctaggaagtttttcctgatttcagtgccatgacctgagtcttcagagctctttgttggcccaggttcacaggtgttgtgagtgtggaaaggaaatagcatggagaggctggaggaacttgacacatggctttcaagtctcatggttgatgttagatgttagctgtgcttcctccctgggtctttgccaggactcaccactggtgggtggggaaattgccacctccccaggccagccctgccagtctcacatcccatctgcaggaccatggccttcagagagcagacatttgtgttcttagtcactgcctctggactgcttagaaaatcgatccttgatcctatatttggattccatggtcttataagaaagcaaccactgtcactctgcatccttgctggcccagtcacaggctctacgttaatttatagacatctgaactcgtttgttaacccaggtgctacaggtggaatcctccagcaaagcctggtctccaatgctctgggtagaggtgttgaaaagttaccacctgctgcaagtggatggcttgaaagaatattctggggtggagggaagtgccacctaagcaagggtttattcctgggtggaagaaactgcaggctctgggaatgagtctttgaaggtgtgtctggctttccaaagtgagctaccaggaggagctcggtgtggggcagtcagaagccatgccaggtatgtgatggagtccctgggtcattgattctgctggaggccaggactgattcagcagagatccctttctcctgtagcggagaaaaatgaatatctttcctttacccatctaaaggttctcagctgaggcacctatacagacagagtaacaagagaaaaatgtacaaatgtgcttaatataaaatttacatgacacaggagcctgcaaaaatgaagacccaaagcaacagaaaccagtgtatttttatgcttaagtttgaagaatagcagacagatgtggagaagtataattggacaaaaggagtatgatttaatggcaataaactggggggagcttagcaaggcctgtttgctcggattcttcgctgcatccctgtgtcttcagagataaggatactcctttcctttgggtataggttgtacactttaaagatgagggtgttataatctactttagaggaaggtcagataattatttatggcctgcttcaggaaagaatggctgcagaaggtcagagagactttcctgcttctgctgttcctcaaatgccaaggtgccatattttggggtagtgtattctgaaccccatcactctctccctccctttctccctccttctctgccctgcccactgagccctgagccctccaggttctctggggacagactttcccaggcataggaggattcgttttcctgcatagcattataagcacctgtcaatttcactatctggctataagaacacagagctatatttgttgaaaaataggaagcttggggtcaaggatgaaaaaagagtggagccttatcctaggtcctgtggtggctgctgtttgggtgctccaggggtcccccagaaagcctcccagatcctctccaccaattgaaatgctgaggatgtcctacatttatttgttgctttcttgggggtgagtgggtgctttagaggggaccttacagcttttgctggctttcagtatcatttccctgttcctgtatcgcagtgctggatttattttcacagagagggcagccgttctctgaattcatgagtgccatggattttaagacaatgttttctgagaacggcaaaattatggggccagaaaacagataaattgttgccaggaaaggggaagggactcattacaagagcaacaggaaggaatttggtgcgtggaagttgggggcggttgatagaagtattctctctcttgattgtggtggtagttacgtgactgtgtgtatgtctaaatccataattttacatcagaaagagtgaattttactgtgtatgactttataacaattattttaaaaagtttttttaaatgtctacctatttaaaaaccgggctatagatgtttgagtcagtgcttttgtctcagggctatcaaaacgcagtgtggcctgctggaaagagcacaaggcttgagtctgagtctgccgtgatcctcagttaggcctcttacaggccgcatctccacatctgttaagaaaaacaccaccacgacataagaggataatgaaaactatctcatgaagctgtgatgaagatttaaataaaaggatgcatcacgaagtgagagacgcatacctagtagaggctaatttgtgttaacttttgtttctatcactctttctggcagtcacaagcatctctaaaatgctttttgcatgcataatgctagcaacagctatttgtttgtatgactcagtctccaggcttaactttcccttttgcataaggagtttgggggtgcttgagattgttacattttcctttacatgtataatatactcactttttgtcaagaagtagacatgagcaatgagttagtggaagatacccagtcagagaaaggtttaacgaaggaaaactcccgtttgtattcgggtccaggattttagactacagaaggtatggggaaatgataacaagggcctcattaggaaggtgcttttgttttcctgcctgtgttttccgggagccattgaagtctgggtactttgcatttatcctgtggctaaaatgtctattcgctttgcagctctgggttggttttgctttagaactccgtgctgggtctgaccatcctatactggtttctctactgaagcttgatgccctgaaggcagtcaatttctttttgacccaaatcttccatgaaaaattactgacttcttatagaggtccacaggaagatgagttttcaaagcctttcccgtgcttatctggccaacgtggtgatgtgcattctggtgatactttgttatcacaagggctttgtcgttgatcgacaccttcctgggtctacggtccttgccaggctgctgagcaccattcccccattttacagctgggcccattaaggtgaagcaatttgctttggactttgttacagaggaagtcagcaacagggctcagtgccaatcttagcatgaacttcctcgaattgtaagagcccttttcttttccagtttcatgacagctctcctccaagcctttctgaggactctggaaactatcagctgctgttggccctggttcgtagatgttacagaaattgaatgggggccagacaggagccagggaaatcagtgagccaggcttcctccgctgtgaagtggctcttttgtacgggctgttctggccataatacctgcgtaatttttttctttcctgtctgcaacctagcctgcggggtgctttctgtttccattgctttttctacataatgggctccctggacagtaccactctcccagacttctcatcccagctgcttcctttctgagccagtagctctcaccaaagaggccaaaagaggacctggcaatgttgagtcattgcgtgcagtatgtgagtagccagtgtgtgaacacagctgcagtgaacggaattagcaataagacacaacgcaaccaggtagcctcatttgttcagattgaggtcttcaaaaagcattttaagtttacgggtggaaaggtgtgatacctttcctcagccatcattaagggctaacactcctataacaaaaacaagttaacgagaaaaacataacacatttatttaatcagagttttacatggcacaggaggcttcagaaatgaagacccaaagacccaggaaaaactatttttatgctcagatttaatgcagaatagtcagctatgaaggaatgtgattggacaaaatgggtatgatctaatggttatagactggggggtgagcggaccagcaagccctgtctgttcagattcttcttggacgctctgcatagtatttattcctcttgggtatggggccggactcctctaaatggagggccttcaagggagaaggaagagagtgacctttctaggttttatgtttgctttgagggagaggagtcctagtttctaagactggctttgaggaagaggaattctggtttctatggcttgcatccagggagaaaaaggagtgtgagaggggagggcaagagaaggcagagagatcttgcttctgaggccttccaatctcctttggttcaaagtactcaggcataccaaagtgtcacacttaggggtatcatactgtgagccacaacataaatatctccattcctttttactcaatttcacataaaaaaagctggaaaaggtgatccacaatgaagatgtttgtcctccttgtcttaaactgatttctatatctagaaatgtctttattgggcaaaagtgcttcctcttcagccataatgggtgcagatctgattctttctcttctctgacacttactggccctgggacagctggaaactcactttgactctccaaggagcacatccctaaatgtgtgatctcttgatatctctcccacttttgaaaagaactgacaagggaaaaatgttcacttacccatcagctggttttgctctttttgtttaatgtctttggggagaaagcaaagagctaggacatgaagaaaacttctatctccactacattttgaagttttgcaaacccagccatctttcccaagagcagagcagtagaagcaaccaggatgcaaccagggttggtaattggttggttaattaaaaagtcagaaaagacagagagtcataaaagatgatgcatgcgtattttaaacctttttgtttctagctgaaaacatgccctctcatttgctattcattcgatataggaccaagtatttctgtttgtagagcctgctgattggcttttcacatgaccctcgttgtgtaaacctcacctatcatgcatcattaacagtttccacttttggtgtctttaaagtgggctggaaacgttaagagcacttgcaaaacaattctcagcctccccctctctcttaaatgttattgaatctttccaaggtttccagcttgctttttatggaaacaagcacttgttttcacattaatatttcatcgctctacatagtatttatttagattgtataattaggatatttaaatataactggcctacagaagtgaagaaacaaatgcaacttgaccaatagaaacagaactgcgcaggcttaccaggaccctgcccctggcctggccctggccactgaatttgagagagaaagcagagtccagggacaagctggcaggtggctaagagaggtgtttcttctgttcagtgagctggctcctgcttgttctctcagttaattactgtcatcagcttgtcagcctccttcacctgcccaagggaaggaaggggactcctctgatctgctggcttctccttctttcggaatatggtggaaccttgctccatgctccagggcctcacggtggccctttttccactaattaaaaatagttcagcgcttctgaggaaaacaacctcagggctcttggtgacgccgttcaccttggaaattccttgtcattcactggtgcagtctgagggatcgatagcaggatggcgtctgcctgaatggcaaggactcattttctgcgtttgtaacagaggaggtgttatccaatgaatcctcagtggtgtcctgggagtagctgagaatttttgtaatgtggaaaatcagatagcaccctgccccctcatcacagctacagtgcatttgatttccccaccactgggcagccagggcagttaaagtcaagagcttccactccccaggagcttccggtccccccataagctggtcgtgagctattcctgcccttcctaactaggagcaggcaggagatgaacactggagttccatgaagctcctgtgtgaaattatcttacctctacccaagacttactgcactgcctttttcagtgaatcgtttaatgccttccattctgaatatgctggtgtttctgctttgccagccattggtcattccacaccccctcctccacccggcccccaggtatttcctggaaccattgattatggcagagcagatcttattttgctcatatgattaggaacctcaggccaacaagcttgggtaatagtgagagaaaagaagagtggtcctttgctcttctttgtctgagtgccttttgagggaaagagtagataccaccaaccatagcatctctatctctttccagcaaactacaggggtgcctgagactttagggtgggaagcaagctctcacttggaaggggtgacatccagaaccaggattaaacgctgacatttaaaaacagtaactatggtagtcttaatagttgcacagtttacagtgaaacacttagagttcaaatttgttttactataaagtgaacatggatggagtttgggatttgattctgtcttcatagtttccctttacagttcaatatttcttagctcaaagaacacattcccttaaaaggaatccctcaaaccacttttcatttttattttcttatacaaaagggccttagggttggatgtccctatccccagaatctgaatccttttattaaagggactgtatctaggtactagccggtgccatgaatctcattttggattcaaatggattattttctcagagggttctaatgaagtctggttttattcagatttgactatcaaactcagtgtgcttaaagaaaagcagttcacatcctcttgcatgatcgtgtaatataaactgtagcttttcaaaggttgcccttcaagtaaactagaaaccacaggccaattaacatatgccaattagcaagcaatttcttcttctaacaatttgtttggttctgttaattacttttatttagagcttgtttctccgagccaccttcaaaacaagcatgcagatacttgaagacaattcattgcttgctctgacctaaagagatctaaatatttcagatgctttctttaccactgacgacatctggatgcttttaaaagaaatacgcagttactcagggagtaaccgtataatttgaatatgtggatgaatactcgtatcagatagagtaataaagatatacccttaatgtctcaattttgcctctctgcttattggcatttacacgactgtagaactcggcatttatatgaaaagacaaacaccataaaatctatgtcaaatacatgtgaaatatattctttgtgttgtgggcaggcatttgtttgaagtaaatattctttttgtagataatattttaaaaagaaagacaaaaccatatcgcattcctgaaatgtatttaccaagcatgtattttggaaaacagcccaaaggaacatatttaaggcagtgattttaatactaaactaaggaaatagtttgatgcatcagctaagctcatggatgggggtaatcacatctggtttacctcaagccagaggagaaggagtgagacttgacaatgtaacaaccattatgaggctcaagtagcgtttttggcttgtaagcatgtatgtgtgctgtgttcaattttatgttttaaatttttttaaaaaacttaaatactgctatagccccaaaatatgtaaaatatgtaaacagttggcttgatggccataagggaacacctgtccttttttttttttttttttttactgtgtagcctgtgactttcactgcaggaattaaatatttttgtggataggcaaatgtacttttgtggataggtattgctgatgccttattacacagccgaaggaaataaggatctgggtaagcagttgagtcacggcaaagagtaccgtatccaaggtggaggttcatgctagagctacaggtactaacccctcccctgcaccactgatccctagcaagggtggaagtaactgatgacttctctgcacagcccccagcacaatgtctgaaagagagacctaaagggtaactgcctgttttctcagattaatcttagaatcctagcagtacttgttacttcagtttggagatttttcttattctatttcttcacactcttacagacttcacatagcccctccctttagaataactcttgacagcattttaagaaatagactatttaaatcatcttgatccagtgactcaacccaaggtgtaacccgtctgctcaaatttgtggcaaatctccattgatgataacatttctgcaaatgtatgctctgttaggtgtggaagcttttcctaagtagaattggcagccacagtagtacctgcctacctagcaatttaacttaaacagtttccttttccaaaggtattttctattcagaatagaaataataaatatgatttcctcatcactctagatacagcctgatgagatattgttaccagatactttctcttatcaaaacaaccattattatttcataatatattccctaccctttgaatataagctccagttctaaaattttaaatgttggtatcttccacatgtcatagggaaagacttaagccttgtttatgggaactataactgagtaaaaatgtccttggagaccctggtcatggaatttgtgactgttcttctactggggcatgtggtttagacatctgctcaggctagcaactgaatgcttttctgggtatacacttttatagaaaaatgttttttgaaagtcactttaatgggaaaatcctgcccaacaaaggaaatcctattttctgtttttaaatcatgctccctgagttgggtgagcaggacagaaatttgacatcagctctaattcaacacagctgaaaatttctgcccaaacattcaggcctacgggttttgatcatgaggtgagttaagcaaattatatttgaaatattgcctggctgagtcggtgctactgaatcatacccgtgtggagggacagcagggaagatggtagggctttattggaggccaataaaagccatgtgtgtacagcagtactgtggagagccccaggaccccatggctgtccctgtggcaagaaaattatcccagataaggctgttcttggctgcactgaggcaaaggcatgtgctcagcatccagaaaggttcttcttgttggttttccttcctggctctttatacttgggtgaaatgatctcttggaagtgtagtctgaaaaacagcatagcttcttccaagttctcataagatacaggagtctccattcattacttcaataagcattactgagcaccttttatgagcaaggtaggacgacggaggcagggccaggacctcatcatctggtgagggagacaggcggttacacacacagggaggaactcctcctacccagaagtaggcagggttggagattcgggattgaagcgttcctggaagaagtggaatctgcagagttttgaaaagagggggtgttaggtgtagcaatcagaccatttacctgttataactgcttttcattctgacccacagggaaaacaattattcctagggttaaatgatgggacggatgttcagaaaggaaaaaaataataatttgaattgctgaaaggaccgcctgacaagacaaattactggagagtcttcaaagacactttgaaatgccgagcaacctgtactttaaatgatccgttcagaattgcaaatcctacagaactccatttctgctaggaatcccagtggctttgtagtgggtggtatttttaattatcaagtatcagtcttgcaggctttctcttttttgtcacatttgatttaaagtacaaatgggagcaaaagttacaaattgcacacagagagacactcagtgtgtgaaattgtggacatggttcagaatatgtttatttggaatccgctgaggtgatgggagagatgggactggatactcatgttcttatttggaaaggagacattctcgccgcctttcccatgtgcccgcttgcttttctctgcttccagcctgatattttatggacttgtggatgagaggtcctgtgcccatcattgcattccagattgtcatggctgttatcattgtcacctccactcattatgcctctgagtcctggagggagcatatccctttaataagactgaaccctccaggaattgagactttgcagagttctgagagtagaagggaagagaacaccatgtctacaggtgctggctgtttgcttctctgatttctttccatcaccactttgcccaagttacatgactctttggccaggtgcggtggctcacacctgtaatcccagcactttggggggccaaggcaggcagatcacctgagatcgggagttcgagaccagcctgaccaacatggagaaaccctgcctctactaaaaatacaaaaattagcctggcatggtggtgcatgcctgtaatcccagctactcgggaggctgaggcaggagaatcacttgaacccaggaggcagaggtcgcagtgagccgagatcacgccattgcactccagcctgggcaacaagagtgaaactgtctcaaaaaataaataaataaataaaaaataaaaggattcttcaagcctcttttcttgtatgtaaaagaaggaattgaaccttgaggatggttcctaagacccctaccaaatccagcagcattctctgcttctaggtattaagattctcagggaaggtttccgacattcttagtagccctgaaggaggcagatctttgtaaatgcatttgctgtcctgggaaacaagatggtgttaagataaggaagctccatttctcttgcagttataacccaaggcagagcctcctgattaatacacctggcttacaactcactattttggcttaaacagaaatgtcagtgcttccaaagctttcactgagacaccttctttgaaaaaaaaagtttcttttattttaaaagaagcaaacaaactctcttcaacagctccctttatttacttatttatttatgtagctttctatgaaggcttagcaaataaaacagataaaattagaaattgaggtagagttgacagtaaaaacccttttcctcctaccaggggatctctgcagaataaggcctaaagcccactggtttgagagaacatcctccagcaaggtgctttccaagcaagggaaaaactagaagtagtgaaatacacctgatgcttcctgcagagactatgccatcctgtgtgaccgtaacatataaacatcacataccaggaggacatgatcatttaaatagacagcaatgttgtccttcagtctaggcaatgggtgtgccccaaggccagtgtgagggtccgggagacaggaatctgtatatttcttacctgcctctcatgatttgagcaccttgctctgctaagtgtcccctgaagaaagagccacttctcccaaaggtggaagaaagtgaggccctgtgggtcgtattgcactcagatatgttggactcactgtggtatgtcttcctgcggaattttctaggaaatttttactgtacttgttctatacacacacacacacacacacacacacacacacacacacacaaccctcagaatatgtgcctgtactgttcaataacttacacattgaactaggagccagggatctgggattactgaccagtggcagtggtcacttgttgtaatgtctttgttgcacttcccagcctaatggccatagtgccctgcatgggtaggagttcccctccctgagagaagtctgggcattagcactttagtgagcttcaaaaatctagtcagtcaactccctaactaggtaccagtgaagatgcactacctgctagcattttgcaatagttttatccactcatgcgaggttctgtgtagggacaacccatgtaaggcccctgttttacctactatggctgcatcaaaatcaacacaaacttagtgatttaaaagaactatttatgatattcgtggatctgtagatcagaaattggggtggggcacagtgaggagggtgtctctgctccacaatgtctgggtgttagctgaatgacttgaagacaggggctgggaccatctgaaggttcagtccttcccaagtctggctgttgactagggctttagctgaggctctcatccagacatctacaaacagcccgtccatgtagctggggcttcctcacaacatggagactgggttccagggtgggtgatctgaaaagacatgtcaccttttatgacctgactttgcaagtcaggcagtgtcaccttcactatgttccatacattgaaggaatttcaagggccatccaggtttaacaggagaagtaataaactctgttttttgatggtggagaggcaatattccagaaaagtgtgttgctatgaccacacctacactctgccatacctgggcatggcatggaaatggccaaggaagttttgcctagtccctcatttatggactaagaggcaggacctgggcaactttgcacagctgatacccatggttcttttttttttttttttgagatggagtctcctctgttgccaggccggagtgcagtggtgcgatcttggcttactgcaacctccgcctcctggggtcaagcaattctcctgcctcagcctcctgagtagccgggactacaggcctgcaccaccacacccagctaatttttgtattattagcagagacagggttttaccatgttggccaggatggtctcgatctcttgaccttgtgatccacctgcctcggcctcccaaagtgctgggattacaggcgtgagccaccgcacccagccaatacccatggttctgatcccaccctgctctctctggacagacagatttctttggacagaacagaattttttaccagattgatagaaatatattaatctaccctctcatcagctgtcaattctcagtttaggtctaaactaattctattctcaagattccaagtgagagcattatagtaaaataatacatctcttaagtcatatctacccagttcacattcagtatcctctcagttcagaatcagaagctgtcagaccaacaagtagaggttcctgcacaagcctgagagagatcctgtaacttgtgccttggaaaaacagccccacgaaagaatgccagacagatcttctcttagcaaacatggtgacttgagctctctgaatttgttcccttatgctacattgtttgttttttaatctctaaaaaaactaaaaaaaatttcaggtaaattttcttcctttttcattatggtttgaattagggtttttgataactttttttccaaattttagggatgttaaaggttcaggaaagtataaagaagaaaataaaaatttcccataatactgccccacaaataataattataaatattttgatgctttgcctatttgagttatttcatcatcattaaatgctcttttattaaaaatgactttaatggctaaatacaaatctgctgtaccagaacttatttaactattccctttattgtttgacaattatttcctctttcctatacttttaatgccatcatctttgcatgaaaaatcttttatttctatttgatatatgtgataggcattcttccatgcttattacaagggcttaataaaagttatttcaatttaaatgaacaaattatttctttttgatagattccaggaaaggaaattattgggtcttaagatatgaacaatttaaagcgcttgttatgtggtctgaaattgctttccaaaatttatgccattactatcaatctgcacgtaatttaaaaaggaaaacaggcaggaattatatgtttgggggagaaatgtaaaactgtattttaaatttgtttaatttagctctgatttcatatttgttgtagccgtaagatgaagattgagtcatttgatttcgtttaagggtgttttaaattccttggttttctgttctgagtctatgctttttctctctttaagtgtgttttcagtcatatatattttcctgctaacactgtatgtttctccttcctgtatgatttgtggtttcatgactgtcaatcattttttcccagatgttctttttcttagtgtctcatttatttcatgtgtgatgacggtgttgctcattatccagtgtctacacttctgtgtaatctcctaccctcaatttcatatctttgattattttagggtcagtaaaaatatatatatatatacacacacatatatatgtatatatgtgtatgtgtgtatatatatatatatttatctgtgatttttatgtatttgctgtcttctcaccactgttatggtcaattttgagtaaaccttcaagggtgcttcacactaaagttcctttaattgtgtccatatgtccccacaattgtatgttattgccactagatttcttttctatatacacttacttgcagtaaatgcgtatagtcattctgtagcttgtagctcattcttcagtatactagacttctccaatatttacaagttatttgcagttcccattagcactattttattctaaggtagttggccattggcatgtaaattttaaagctaatatagcaaaaatcaaattatatacttggatttaattgttatttgtggaatctgattataatattatataatgcataatctccagactttttaacagtgactattaccgcacctgggcattttgttgttattgttgggtattcattgtatcttttgtagtaaacttgtagtttaagatgaatacgtatcttaatagtttcccttatgcaatttttttttttttgagacagcgtcttgctctgttgtccaggctggagtgcagtggcatgatctcagatcactgcaatctccgcctcccgggttcaagcgattcttctgcctcagcctcctgagtggctgggattacaggcgcccaccaccacgcccagctaatttttgtatttttttagagagggggtttaaccatgttggccaggctggtcttgaactcctgacctcatgatccacccgcctcagcctcccaaagtgctgggattacagctgcgagccactgcgtctggtctgcaaaaattttttagtgtatcttctaagcttttcactcttagttaaggaaatattatctttacatttaagttttaattctgagctcatttcttgcttctccccctgctttattctaagaatctctatcttctgttctcattttcttaaccttgtttattgttttcctttacaagtctgtggccttctacatgcccagcattcaactttgggccctgggatgaatgactaacccatggcccttacctcacttgagtggacacagaacttatcagaatggttgcactacaaggtgaaattattatttggggcctttgaaggaaaggctgggtttcagagaagagtggggaagaatgcatgggcaaaaagaacagcatgagagagggcaacggggttagtcctattggcaaagcttagcttgcctttaggagagttgaggggatacagctgaaccatgggctttgtgcgaggtcctatgaagacagagtttagactctgctctgtggtggtttcgtgcaggaaagtgacataaagaaggcccttttctggctcatagaaataagtttgaagggaaaaagtgagagaaggaaggagctctaagacttaattgttcattcatcaaatcgatcaatactacgtgcctgtcatgtgccagatactatgccaggggctctagggatagcagcaaaaagacatcatcatcctgctctttttttttttttttttgagacggagtctcgctctgtcgcccaggctggagtgcagtggtgcaatctcggctcactgcaagctccgcctcctgggttcacgccattctcctgcctcagcctcccaagtagctgggactacaggcgcccgccactacgcccggctaattttttgtattcttagtaaagacagggtttcaccgtgttagccaggatggtcttgatctcctgacctcgtgatccgcccgcttcggcctcccaaagtgctgcatcatcctgctcttatgcggcttaagctcccatgtatggtggtggtagcggcggctctatatgcagtatacacctcatggcacttaaattctagcattcagggactgtggtcagtgtgtaaacaaatgttcagtgccctagtcaattcctgtgtccttaaaggaatattccctttgtccttacaggttagcccagttgctcctgtgacccctctccccactttttttagaatccctattaaattttgaatttgcccattgatacagctggaagattcagggtttctgtttgataaatccacttcgggacttgacatactggaagcagcactttgaaatgaccagacaagggaggtggcctgtggaactgcatagacaaagctcattctttggtcataacttgaaatcagttcacaacttctcaagtttgatacccaggggagacacaggccctagcacaattctgactgaggtgcagaaactgggagagctctttccaggaagcttccctttgtgttctgtctgtgtccacggcactaacaagtgatcttgttttccccctctcgccaggaatcttacatcctttctgcagaacttggagaaaagtgtgaagacataggcaagaagctattgtacttggaagatcaacttcacacagcaatccacagtcatgatgaagatctcattcatatccttttcatcttgcagatgaagcaaggcaaagttattttataaaagagagtctttaaagggtagtttttcatgcctcagaagatggcaacaaatagatgctgccgttatttatagcacagagcacctcagatctctgagattatcaggtatgaaatgttttcgctctagttttcagtaagcaattcagtattttttttcttttttcttttttttttttttttttttttgatgccttggctggagtgcaatggtgtgatctcagctcactgcagcctccacctcctgggttcaaacggttctcctgcctcagcctcctgagtagctgggattacaggtgcccgccagcacgcccagctaatttttttgtatttttagtagagagagggttttgccatgtttgccaggctggtctagaactcctgacctcaagtgatccgcccgccttggcctcccaaagtgctgggattacaggcttgggccaccgcatccggccgcaattcagtatttttaattgctaaatccaaccactaacaattaagttcagacatgcacacgaggaagccaaagaaaatgcagtttcaagtgagtgtaaatccagctctgtgtggccctggtgaaggaaaacagttgactggctcgttttcctacgagctttttcaataccaagcgtcctaaatccacctctgaatttctttatctagcaactctacctagtaatgggcagtacagtaacaaagcaaacaggactttagattatttcctttcaacttctaaccatatacacatggttgaactcaatttagtcctttctgcttcccggtgatagaatttcttgcaccagacttaatatccttggtgtcacacctacaaacaccttcatcaaaactagctgctagtgagcaagatggcctgagaacatactggcttaggtatgcatccgtatgaagcactccattctgtgttgatctgtggacgcagtttgtcactggttagttctgctgagagcaaatgggtgggtacccagtggatgaagggatatgcagccctatatcctttcagttatttaatcacaagttgacacttctctagctaaaaacacttccctattcattcatctttctattcagtagaatgtcttttattagatgcgtttgtggcaaatttagctattttggtctttgcttgtcattgctgtcttactttttagaattccagtttttaccatactttatgggctgtgtgtgtgtgtgtgtgtgtgtgtgtgtgtgtgtgtataagtagctttgaatggccaaggattaatcttagtcataaatactcagatctgtgatttaatgatagagccaatgctacacttccttccttgttataactttacatttttgaccttgtttattaagctgggcagaaaatttcttcaacttaatctgcaatgattttcacattgctttaggtagattttgaaaagcagatattctgttcttcataatttcctgcctcttaaaaatcttgtatttaagctattatcagaaagtttcccaaagaagcatacaaacatagaataaggatggcgtttttatttattccatgttcatgggatcacaaatctttgagcacgtgtaagggggtatggcttccagcaaatgggcaggtgatggggcacagaggaggagtccgctgcagagagtcaatggatatgaaggggttcccgttccccagctcagcagatgggcagttcctaagtgggttgtacctctgtcttcaggtagcagttctgagggctgcagtcagggttctgtactggtctcttattgtgaaattttctaaaaggttagtttgattctggggaattggatcttatttttactagagctggggaggcagctctagtaaagacccctgaaaaacaaggggttaagcagtatttaaacaagatccttttagtttttccacagctgatccaagccagatttaatagcagcgggatcatggacaagtgataatgcctctttaagcattagggttcccatctgtaatgtcaggataacatacacctctaaggtttttatgggggttaaataaggctatattcataatgtacatttaatatagccatgggtaagtgcatgattttaggtagaaaagtgttatccaagtccatttgtctcacagttcttagtatattagtcacaagctccaagaacatcccatttatacacaaaaagtttcaaggtagattgattcaactattttgtaataaatgcttgaaggaatcaatcagtaactccacagtggcttagatgaaaagtcatttaattataataaaacttctataaatggatagggattattatccctacttgacagtcgaaaaaaacaaggcttgggaacaacttggctgacacaaggtcatttctgatgagtagcagaacttttcagccacaagccccatggtcctattaggcccatcagaaagcagccattgcctataagtaaatggacaggtctgttccatggaacacacaattactttaaatttttaagctataataaaagtatttcactgatgttatgttttttgagaatttcactgatctctgttgtgataagcggagaagcactggtttaggtactgaagtcagctctctccctccctccaataaaatctacaccacgatatggatttcaacccagacttttcttcgaatcccagtcttctgtcactgattgagaataaatacacagaaggtgtctttgaattcatacaaagcagcacttaaatttgagtggaacattatgccctaagatagaaagacatgtttacaaggctctacggaggctcccctacacaaaccaaagccgttgtttcaaattagagcttatctagagattcagagaggctgccagaatcctccagccaaactctgactggtttgtatttccatgtttgatcaaagatacaatgctgagtgtggctgaaagaaacagcttgttgtcaacaatacagaaggattgcacagtgagtgcagtgttttgtttgattccattaagcatgctgccagagcctactgtgcatgtgaggtacccaattaatctaagtccacattggaatgtgattaatgtaagcccacattggacgtccacgtctgaaagattcaagccacagatgctaccatggatgtttattctttgtgtggaaaacactcagtttttgcataaaccatgtgtgtacataagggctattagtgtggcatcaacagaggttaggggtgggcagtgggactgagtttccaaataggtccttgtggcctcctgatttaatatccgagttatgggcagcctcatgggtgtctcctacttttattaagaagacactgattgaccaatccaaggagggagaggaaagagcctttgcctcttcatcgtcctgacaggctcaccaaattacatgtagcatgaccaaagaacaacacaaacccatcagctactgtggcagcgagtgtctgaaaacagtctgcaccattaattgggagagctggtggtggagaggtggctcacgcctagtgcctgagaaggggacaggaggtgtgacttcacggccagtcaagtcgggacttccaggagcattagtgtgagtctctagtgcattttcacagtcatctggggtcctaattagcagtatgttttgaaaaacattttgactgtgtgcaaggtctcctccacgctcaaaatattgtaaccaaaagccttccaaattaaggtggatttttaagcaggaattttctcattttcttcctccttcaatttctacaacacactttcaaaggaaaagaagtacacctgtgatatgtacatttttggcatatttcaaagccctcagggcagttctgcctggccctcagtcatagacgaggtagagacactctgattctatttgtggttgtatttacatccatgtctgggaagcccttatggaattctgtttctctggttatttggagtgcatggtgcccaattgtttagttttggtggtgcttgagggcatgctctaaatacatccaggtttgtgcacaaataccacagctccgtaggacccttgtttagttcaactttccaaattttagcgtgaacagacaaaggtaacgagagttttgggagactgtcctgcctccttggagatgttttccacttctagagctgaggggctggaagagggatcatgaggatcatggagctccactcatgtagtttatagataagaaaatccagagcctggccaggtgcggtggcttacatcttaatcccggcactttgggaggctgaggtggatggattgtttgagaccaggagtttgagaccagcctaggcaacatggcaaaaccctgtctctattaaaaatacaaaaattaactgggcgtgatggtgcacacctgtagtcccagctactccagaggcgtgagaattgcttgaacccaggaggtggaggtcgcagtgagctgagactgcacactactacactccagcctgggcaacaaagtaagacactgccaaagaaggagggagggaaggaaggaaggaaggagggagagaggagagagagagagagaacaggaaggaaggaagggagaaaggagagacagagagagaggaaggaaggaagggagaaagagagagagaaagagaggaaggaaggaaggagaaagaaagataaagaaagaaaaagaaagaaaagaggaaggaaggaaggagagagggaaggagagaaaaggaaaggaaaaggaaaagaggaaagaaaaggaaagggaagggagagggaaaggagaagggaaaggaagagaagggaagaagggaagggagaagagacaagggaaaggagaagggaaaagggaaaggagaagggaagggagaagggaagggagcaaaagggaaggaaagaaagaaaggaaaggaaaggaaagaaagaaaaggaaaggaaagaaagaaaacccagagcctaagatgacagtatctaaagctttgtgtgtgatgggctggtgcagatatagtagtcacagttctttccttaggctctcacttggctttggagtgggacggggaagagttggagccccacagtgggtgggggagggcaagggcgtagacacagggctgtcctgctgctggctgagcacgaggtgggcttggcacaaggtaggcaacacagagtttctgtgtacaagcatcaaatcctttgaatcaatcttgggtatagtcaaggttttcctctttgctcttgaaagactgtgatcctcatggcttttccatgaggatctccagtaccaaattctccagcactatgggctgtagtggctacccaggaaggaatggtggtaagaagaaataatgtagcaaaagagtagcactttcaaaggataagagagtcccttatctgaaatgcttgggactagaagtgttttgaagttctgctttttttcagattgtggaatatttgcattatacttaccagtggagcataccaaatccaaaaatcccaaatctgaaatgttccaatgagcatttcctttgaacatcacgtcagtgctcagaaggttttggattctggagcatttcagattttggatttggggatttgggatgctcaacttgttctattgtttctttttgaatcaaactaggtcagatgaaccgaagacctaaatttgactaagccattgaaatgcttacttggacacttcattaacagtaaaacactcaattgttttcttataaaaacagaagactccatctaaagaattccaggatcttttgcaaatggtaccccaaatgacaatattgccttatcatctattcctgaatgcacctgtcctgctgtcttactcctttgctaattgcaaacacagacattttaacaagttacatgcttacctaccatgtggatagtctattccaaggaggtacagaatggccttgggttccaaaggtgttttaaagatgttaggatgttcatccctgcgacgttgttataatgaatctgctaattttcttagataccacaggtacttggtggcatatctgttatggggggcagatacttagctactcaggtccctaaggcacaggcttcataagaattattctgcttttttgaggcctattcttgcaattaggtgcagttagcacctctattctagttttggaatttgcctaaattgtcaatagttttggaatttgcctaaaatttctatttgcctaaaattccaattgtttttcagctctttgacaacaattaaggtcaaggtcaagtgtttcaatgggcttcaactatgagcttattggattagtgatcagaaaatctgattatagctactacttagccttaagatcttgcttagatgtatcaaatgagatagtttatttttctgtaagtcagtgagaaaatgttgtaaaacacttttttttaatttatggttcaatatgaatgccagacttatatctgttttctactcagcatcttctcttggctaataagcttgtccaacttaccctgtctaaaatccaattccctccctcctctaccaaaaacaccaaacgctcattcctagtcctcttcttctcaataaaatacagatgtgtttttctaattatttgctcagataaaaaatcagggagtccttcttaatgccttttccattttccatatcccacatccagtctgtcaccatatatatgctcttggttgtatctgcaaaacacatccagaatctagccacctctcctacctccactgccactgccctgttcaagccatgattgtttcttgcctgaactattgcagtggtctcctaactggtcactctgtgcttccgcccttatcctctttaatccattctcagcacagcagccaaactgacgatgtcacccctctgctccaggtcctcccacggctcctcccatctcactgtgaacacagcacagctggacataactaccaacatggcgcctgtttactttctgctgcactcataggtatttatgccatctatgatggcagtgactttgattcactcctgtgctgctgtgtccataacatttgttaacacacagtagaaactcaggaaacatttgaatgtttgaatgagtgaaagaaagaaagaggatctctctctgcactttcatttctcccaactgcttaacagggaaatgtttccagtggtttattttataaacatattgatttaaatatgaaagcaatgcatttccattgtgaatatcacagaagtatggaaaataaagctgtttccctcccagtgcctctacctagaggtcactactttgtcctcctgaagcctttttctagagctataaatggcttatctcaatagtcttgtttgcaaaattaggatcattccatataaattattctacaatatgctttcccccaccccattctgcatttttttttctggggacttttccatttcagtacatccaaaatgctttgtaactcacattttgtaagggatcctacaggcaggttggttagagagaagtactttgcaaataaaatgtgattttaattattattttgatgattattacccctacaggctcattaaatgaggtttctaggatttctggtgtctaaccctgctttgacagagcctaaggtatttgttacatctgttatattaagaaataaaccttaaatctcatgatgactcacaaaagacactatactctcacaaggaaaaaatatttctttgaaccctaaccctatgaggaaggtacaagattcagtattttacaagtagaataattaagcattgattgatttgctgagcttaccatagctagggagttatctcctcaaatgctggttttctgacaccttctgtgttagcgattgttgtatgagcggctgatgtgttaatttagttatagactaacttcatcctttgcttttgtaacttctcactccttatttttaaccttttcagtgggttctgccagttccagaagatttatcagtttttaaagaaacatcacattttggttcaagttctctctctaaaaacctttgtcatcatttagcacattacaaatagtggcatgtagtcccaggctgcatgtcaaaggtaattaaatctcaggagttggtcaggattcataaactgcttaagctccatgcctgctcttcacagatgtggcatgactttgtgattaaattccagtttggtattcagtctgggaccacttatgcttttgcttgtataaagtggtatatgttttcaataaagattagcggaactatgtaagaaatggaagcaaccaaagcctcttaaaaaaaaaaaagaaagaaaggtaaatattggattctttcctcccctgatcaccctcctacccaactcccattttcctcaagttcaaatgcaaggagagaaccctagcagtaaatgcatgtaaattacgcaaatgatagagtctggggaagcttcaagagggtgaaaaactgccagaacttttcagggtggttcagcacgtttgcttagaagagattcatttccatcattcccaggatcctctggagttccttgttcaaaaaagaaaggaggctgggcatggtggctcatgcctgtaatcccagcactttgggaggccaaggcaggcagactgcctgaggtcaggggttcaagaccaatgtggccaacatggtgaaaccccatttctactaaaaatacaaaaattagcatggtggcacacacctataatcccagctatttgggaggctgaggcaggagaatcacttgaatcccggagacggaggttgcagtgagccgagatcgcaccactgcactccagcctgggctacaagtgcaaaactctgtctcaaaaaaagaaaaaagaaagggaaagctttccacagtggttcgtaagggtgtctttttctctttttgttgcattgacattgcactttgggaaaaccacattgtagtgtaggtggtctgtaaacagtcagactccctttcccaaagctccccattccctccatgtctgatctagtactgttgtagtggtctggcttcatgtgatgacttcagcatatttaggtggtgtcaacatatttctactttctcccttggtccctgttggatgaaagtggatcaatttgcttgttaaacccaacgctcaccctgcatttgccttagagttgttctgactacaagtaaaaagggaaaggatgaactggatgacgtatggacagaaaaaccactgttggttaaacattcccctgcttgaacacccagacgagaacccgtttcttaagagaactacagccttatctattactgtttgctaagttctctatgattgttttctccatgtgagaaataactttataggttagaaaactaagagcccaacagcttaagaaaagaaaagaaccaaccaaccaacccagaaaaagcaagctctctttgccctttgatggactctatcaagtcttgagtgcccttcctagttcctgggaatatactaacagataacagcaggttagagcctggagaggtttcaaagtcatcatttcaagagaaaactgaggctttaactggtttgcatagggtgacaaggctggttaatggtgaacagagaccatgttaataactgagtctgctccagtatgcctctccctacttatggcaaccccaaatcctgtatttctcaaggagattttgatttcaagcattctaccctttccactgtcaagagtatttgcatctgacagttgccccaccccaacttggggcttagccggagttatggtcacgccaactgcatatcattgagcatctgagttgaccatctgtctctgctaagagctgactcttccatttcctttttaagacctgacttgagagagtcaatacctcaggcattgtagaaattgcggtcattctaaaatataaaagtgtaaagtttatattaatatttaattcatacaattggaaagaactttaaactgcaattaggtgtcagtacccatctgcttccagcaggctcacacgctcttcgatccctcggaggccgcagagggccacgatcaccttcgaatgtgctccttaacaatgtgcccacagtctctcaggagggagctccagatggtgaaggaaactctgcaggccatgatcctgcagctccagccagcaaaggaggcgggagaaagagaagctgcagcttcctgcatgacagctggtgtccacgaagcacaagcctgaggagtgacgggatgggggagggaggtgggccaccatgtttggacccggggggctgctcttccctcccccgccatagctaagatgcctgaatcaattacggagatacagagccttgaggtctttcagtggaaaggtggttcatgttcattctcatcagtgtgaaactgaggagtctgcaatttggaatatggagagagagactgatttgctgaatttccttctaaatgtcactcaaaaatttcttttccatgtcattcttgggaatgtcttccacaggatttgagaatagtttcatctcagcccccattagagagaagttggggtgaattctggaaaaatgtctctttttcctgtgccatttgccttctgctgcaacgaaaatatttcctgattcaagattctataaaaaggaaaccaagcataagactctgtcatcatacctgttacacgttcctacaggtgcacaatctaagagagctaattaacctcagagtctggagttaacagcttttcaccttacttctcctgtgatctaatattatcttagaaaaattaatatgcaatttccaaaagatattttggtaagacaacaacctcccagtgatatgccacctttcaattttccttttgtggcaatgattgcatctgaagaaaggatccctgagagtctctgtttcatcaggacattctgaaatttacccacagtgaggctgtggatggatcaggggacctgtataaaatgtttgagcctgttccattttcccgtggaacctgtttcactcaatgccaggcagtgcagcatttaggaaagcagtgcagtactcagtaaggcagtgcagtactcagtaacacaatacagtactcaggcagtgcagtactcagtaagacagtgcagtgctcagtaaggcagtgcaatactcagtaacagtgtagtactcagtaacagtgaagtactcagtaatacagtacagtattcagtaaggcagtgaagtactcagtaatacaatacagtactcagttaggcagtgcagtactcaggaatgcagcacagtactcaggcagtgcaatactcagtgcggtactcagtaacacagtgcagtactcagtaacagtgcagtactcagtaacagtgcagtactcagtaaggcagtgcagtactcagtaacacagtgcagtactcagtaatacagtacagtactcagtaaggcagtatggtactcagtaaagcaatgcaatgctcagtaacacagtgcagtgctcaataaggcagtgcagtgctcagtaaggcagtgaattgcttagtaacacagtgtagtgctcagtaggacagcatagtactcagtaacacagggcagctagtactcagtactataagtactgagtacttatataggcaatgtagtactcagtaaatcagtgcagtactcagtaatgcaagggcatttcaggctcctgctgggctgcttctttggcccagctgggactcctattgagacagctgcaaaacaggctgatttcaattaggcagcacttcccaaagtgcactgaggaaggtggccccaagagaagctctctaaacaaaggagtaccctctctggtcaagtacctttggtaaatacaccataccataatatctgcttggagaaccacaatgcacattagcatattagtctgagagagaacttatagtaaggaaactcacttgattttatctaacctcaaactttccaagtttaatggatcgtgaatttttttcatgtaactcctattcatatcccatagatctagtattgtacagcactgcattctctgaggaagtcccagtccaaactctgatttacatcactttagaaaccacactcacacttttgcagagtgttgagcttaataactacctgccacagattggtaaatttaatccagtggttgttctgtttgtgcttctgttctcatttatgtgtttagggatagtgaggttcctgccttcactaggatccacggatatgagaccatttttgtcatttcctgaagtcacactggcgtttccagaaggcatctggtgctttgctcagccttccatgctgtgcagcacttctgtcctcagtcaaggagatggccatgcttaagccagcaattggctggggtccaggaaacaaagcaaaagcacaatatgtgaatgtgctgattgtgttccctatggctttatctcgagcaaaatacactctacatattttaataataagtataattagcttgttcctggacttcattttcaatgatgaaccaaattcctgaattatttataattgtgtctaaagaaaattatgaactggtcacatggcacttggaatccttgagttaattccagtgaagcaaaacttgggaagagtcaggattggccacattgccaataacaaattcctacttcgacatatgtcttttcaaaaagcctcccagacacaagacatcttaaccgtcactagcccaagtgttttgtattactcagacaccatcatgaaataattctgtgaggtcatgatgtatttgaaaattctgcaagttaataactgccttgaattgtttgaacccgaaataagggttctttggtacctctagtagatagtgtgttcatttccctgctgcaaattttgaagtatttgggcaggtgagtcatgttttaaccacaagccataactcatctgttgtctttgcttggtcttagagtatcattcagaaagtccgctaagggccagcgtgcttcttctggctacacaaccttctcaggacaagcccactgtcttaagccactttgaccctgggagacacaggactgtgtatcctcaatcatactatacagcagtttttgtcaggggaacataaaaatatccaagagaggttagggcttagatttaaaagcatcaaaacaacaacaatggaaatttatgttggcgatagccaagaccacaagcaaaagcacatactggaaatgatgagttagaatctgatttgactgggatgttttatgagaatgtaagtgtgatattatactgtctgccttgctggaatgctggctttcaaatggtcacccatttttctttcactggcctgagttaggacatgctatcagtaatagtcccagttccatccaactttctgaaatttcatttttttttttgagatggagtctctctctgtcacccaagttggagtgcagtggccccgcaatctcggctcactgcaacctctacctcccaggttcaagctattctactgcctcagcctcccaagtagctggggttacaggcatttgccaccgggccctgatgatttttgtatttttagtagagacagggcttcaccatgttggctaggagggtctcaaactcctgacctcaggcgatccacccccacctcggcttcccaaagtgctgagattacaggtgtgagccaccgcacccggccaactttctgaaatttcaaaactgaattgatccttctccaaattagtatatactattggaaacttgtctttccctgcagtaaggctggtttccccaccccagaaacatgtaacggttggtaccatgctaagcccttgccatgctaagccctttacagtcatatcctataatccccatatcaaccttataaggaaggtgtttgtagatgatgcaactgagccttaagaggactaattccctttttctaaggcacagagctggtaaaatgtgaagtaatagtgaacctaacagtcagagacaggcagcatgctcttaactagtgctcttcctaaagttcctttaatgtccttttgagattttgagccatggaacttacttgttcacctggctaagaactcatggccactgtggaaatcttggttagggagtcaaagaaactgagcctggggcaaacgaggcttcccacactgccaggggagcctcactgtgaagtctaggctcagacaggcatcaacaaacctattcaccccaccatcatcctgatctaaccattccccagtcatcccaggaaaaccactcacagcctgacactgggctgactttcttgaagatcctcatccaattggtgtttttcagaagtgttccaatattatgaattctgtgttgtggagaaaagcaaccatgcatttactggtcaatgccttcttgtatatgtaattcaatacttttacttttaatatcctcaccttatctaatctttgaattttgtcatgtaatttattgcttcattaaggttactttttgttatacaaaataaaagctgatatccaaggcatggtgcatcttgatgattttttgtcctttgaagtatggatgatagaaaaatgtatcaggtttattcatctcatctttctgttacaggatgattaattgtacagttacatcacacgaaacatttataataaagtcatgctttagaattgcacgtgtttactttcagatatcagcaaatcagaaaatcatgaaatattctattcccagactcctagattaaggaaattgaaactaacattaccactagagttgggaacaagacaaagatacccacaataccactgaaaatattttactggagatgctggctaatttagttaggcaagaaaaatatagaagggttacaatttggaaaagaaaaaataaagctttaatattcacagatgatgttattgtaagctgaaaacccaaaagaatcaacagaaaaacgtttacacaattaacacaatcaaaatcaacaggcttcatatatgcagacaataattggaagactgagtataagaaaagaccccattttcaatagcaacaaaaagcaagagaaaatggctaagaatatatttatataagaaatgcataagccttagatgaaggaaattttaagatgaaggacatgagacaagaattgaatacatggaaagacacattaagcttttggataggaaggcatcataaatttaaaaatttccatcagtcaatttataaatatttcctgatcccaaatgggacaatagatgtctagttagcccccatatgcattctcccattcatccttttagccgttctgggtctagacacttaaactgcagaggtacatgtgtgcagaattgcaggtgtacatttgtagcattgtttgtaaggacaaaaatgagaacaaccgacattttcatttgcatcagttggagactggttaaataaattattgtacattcacactatggaatgctttacagttgctaaaaaaaaatctttgtgtacatatgtgcttgtctctgcagagctatcactggaaagggatccaggcgacttagtggaaaaaaaatgggaaggagacttacttttctgctctatactattcttttaaacatttggtaccgtgtgcatatatttacctattcaaaaataaaatcatttctttaagaaaaaagtcataattaatgagcctgagagtaggccctcaagtagggcagggcacacaggctgttgaatggttgcccaggtctccttgcggcttatgcaggattcatctgctatttatttacctactgtgtgcccagcactgtgctagggtatgcacctgatattggtgataaaaaggcaagtatgaactatgacataatgtgatcagatgattttaagttgagaaggaaattgatatggttaagctttgtgtccccacccaaatcttatcttgaattacaatcctcataacccccataatctccgtgtgtcaagggaaagaccaggtggaggtaattgattcatgggggcagtttccccagtgctgttctcatgatagtgagtgagttctgataacatttgatggttttataaggggctcttcccccttcactcagcacttctccttcctgccgccttttgaagaaggtgccttgcttcccctttgccttccgccattattgtaagttt

SEQ ID NO: 155 - DNA, 449256 bp, Homo sapiens
  source 1..449256: mol_type = genomic DNA
tccctcctcctcagcgtcaagaaaaggtggggatcgcaaaattaccgttaagttgtccgggtaaagacttttgggggaggaaaacattaatagtttcacagattgcttttttccttgcgacatgtttcaaacaccggagaagaaaaaagtcttctaagaaagtgcgactcggaggaaatagccacgagaaggaaatcgttagctcgaagccccatctttcatctcacccgtgaacactcctcccctttgagaaaggacaacgctgcgagagcaaatgacaaaaatccccagaaagaagctaaagtccagcatctttcctaagagcccgctacaacctcaaaagcctgcccctgccccatcttggaagcgcgagccgcggccagtcctacctacctagagacctcaccgggacccagcgcgccgggggagggcagccagggcttgggaaactctttcctggggcacctcacgcttcagcgtcaaaagacaatatagatagatgggtgccgggcggtggcgggggggactgttgccacgacccaccggagggacccatgactccgggtcctgaattttctgtcgaccttaagtttcttgtcacgagatgacggccatcaccgggtcgagaaaacggcgagaaaaggcggcccggttcggaaatgggggaggggcgcgcgtccagtcctcctgtcaaggagcggccgcctgcagagaccccgcagtgcgccgtccccggctccggtcccgggcggggggtcttgctgacagatccgctgggcggcggctgctccgccgcagccggtccgcgtcccgctcaaactgcagctcccctccccccacagccccgtctctccgcgctcccgccacattccgcccgccgccgcccactcgcagacgcccaagttgcccctaaccctacttcctcggatttttcgcgattaagtgagagtagaccccgcgcccactccctgcacccaccactgcctgcgggtcccaccactgccacctcccgagtcccgctctgctacttcttcaggctcttaccgactgcgccagccttggcgaagctccgccgactgccctttgctccaagtaatttttggcgatttttaaagtaatttttccggcggagtcatagtggcgctatactctcggacaggttatcctgtctctcccgctagattgatgagatcaggcatcactcgaaaatggcgccgaaagcgctgaggctcctcattcaaattcgttagagccaaccccgccgccccagggaatgccgggaacgcgggctgcctccacagctgtcaataccgcctcttaaccccccttctcttgctttcccgacatttttacgcatgcgcaaactccaaccctcccccctcctcccgccaggcacatgcgcagaatcatcgtggtgcacggctctccctttgcttcttcggttgcagtcctcttgcttcttgcgcgtgcgtgtagcgcttttgcaaagccgcggaggtgaagtgaacttagaggttgtggggccgaggggtcgtcttatagctaccagcccacaggcatttagtctacgttggaggtaaacaaatacgggtcctgcttaggagaaaagaaaaacgtcttacagccagtgtctaaactccaaacaacggaatgtatcaatgagaccttgtatatggatacacgtgcatttaaaaccgccctgccggcttgtagagcttttgccgttctccagcgctttacaggggttatcgcacttaagcctcggaacaactttaccaggtaggaactattactgttctcgttttgaagaccaggaaacctaggctcagagacgttaagtaatttgcccaagacagcacaggtggcacagaagtggatgaatccacatctgtcagattcagcagccctggagttctctaccacgctgtacgattcaacctgagcccacacaggaggcgtggtctccttcttcaacggtgtgtgtgtgtgtgcgcgcgcgcctgcctagagttaatgattaagtttgctgaagcccttcttcccggtcctaagctgcctgttgcgaaggcgctttcattgaattcagtttctcttaccgtcttaacttgttcataaactttttgagataggaatgggcagtttttctgtgtcacttaggatgatttttttttttaatggcgtgataagtgaactgaatccagcaaagacgagtttctgttgtgcaacacgttggtatactgacagctaccacgtattgactgtgtactgtgtgctgggcactgtgctaaataaatgatttacgaattaatcgtgtttattgctcacaacagccttatgaagtaggtattatcttcactttacagatgaggacacctgaggttcagattaagaaatctgccccaaagtcttagaactggtaagtagaagcaccatatctaggcaaacctgtctaccttcaaaaaaaatgggcactctgataggacaattaacgataataaagttgtaatttttttttttttttgagacggagcctcgctctgtcgccaggctggagtgcagtggcgcgatctcggctcactgcagcctccgcctcccgggttcaagcaattctcctgcctcagcctcccgagtagctgggactacaggcaagtgccaccacgcccagctaatttttgtacttttaatagagacggggtttcaccatgttggccagaagggtctcgatctcttgacctcgcgatccgcccgcctcggcctcccaaagtgttgggattacaggcgtgagccaccgcgtggagccctataaagttgtaaatattttaaaaccttcattgtgaatgttaaataagagagtagatatgaaagtgcctgaagtactaataaggaagtgggagaagggtagcatggtttgcattatttaagtgtcttggaaaagaaatggattttagcaatttgagatcagcaagaagtaacgtggcagagtagtataaatacactacttaatctctggtacttttttgcactacttaagtgggtcgactctggaaccgagctgcctgggtgaatcccagctccactacttactagctgtgccttgttgggtaaattatctgttggaccttttgtaaaacaagtactattaatacctcattggactgttgtaaggatgtaaatgagctaacatattaaaggaatttcaacagtgcttggcatattagtaaatgtttgttattgtcagtcagtcattgatcttttaaactggcttctttaatggttgttcaaaaatcaaactacagttagtgcctttaggggtcagcattttttttctttttttttctgagagggagcctcactctgttgcccaggctggttggatcactgcaacctctgcctcccgggttcaagcagttctcctgcctcagcctcccatgtagctgggattacaggtgcgcgccaccacgcccggctaatttttgtatttttagtagagacggggtttcaccatgttggtcaggctggtctccaactcctgacctcgtgatctgtctgcctttgcctcccaaagtgctgggattataggcgtgagccaccgcgctgggcggggttagcattcttattcaagagctccttaaaatgataaatcaaactgacaaatgatttttcccaaatatgaataatgatccctgttaggcaaataaggatgttaatttattttaccatctcataagaataatacctggaaatggaatagatttattgctttttctgattgttaaggttaaaaaaccgaggcccatctaaaatatatataaagtaaaaatcatccaaatttctagcattcagggataaccacatattgtttgtactttaaaaatataatgtacctgtggggacaatcagctagggggggtctggataagtggtatatttgggagacatgtgtaaaattgtactagaacttacaaataggtaagtagcacaatctggtttcctcactgtagaattttttatcttagtccccttttagatataatatgtcaagagaattctaaagtgatgatgataaatgataacatttattgaagacctaatatgtgtcagacactgggctaagcatgtacatgcatttttccatcgaatcatcatgtaactcattaagtgggtgcaattatctctattttgcagagactaaagtttatgtgtaagtcacttttagaagatttaagtctaattgtgtttaaagtcttatttaagaaaaaatctttcatgaaagcttcttgatttgctaaaatgggagaaaacaaaatcaactaacatacagtagttcctatgcctgaacagagagcccgattgtaaaaaacggtcttttgaaaactaagaattttatatttgaccacaagggggtgcaaattcctgagttaaatttcaaaggaaaaacgggaaaagtgcttttactttagaccatcaaattcgtgggttaaaactagtaagaattcctgcctggaactttaataccctacaaagtaatgtactttataagaagaaagaactcaattacttaggtgctcaattagggcagaagtgtcagcttgctttcttcaatacagtcaagagttaatcatccctcccccacccctttccactcacagttagtttgtgtctctgcatacccctctttacttgtcaataagagtagaactgaagtcataatttaaaatctggggttttgctcttggaaactgaaatgcaatcaccagctaatggatgctaaatatgggtagtgtgaagaacagaggtcttgtaatttctatgctttttttccctcctgctgaagtttataatgagtaagctacaactgatgcaatgttggcttcaacatattaacttatttagataaaactgtgaaagctataggtctgttcatctttcaagaaagaatgcaggccgggcgcggtggctcacgcctgtaatcccagcactttgggaggccgaggcaggcggatcacgaggtcaggagatcgagaccatcctggctaacatggtgaaaccccgtctctactaaaaatacaaaaaaattagctgagcgtggtggcaggcgcctgtagtcccagctactcgggaggctgaggcaggagaatggcatgaacctgggaggcggagcttgcagtgagccgagatcgcgccactgcactccagcctgggccactgagcaagactctgtctcgagaaaaaaaaaagaaagaaagaatgcagacagtaccttgaaaacagtatatactactgaatgtattaaaaactttgcttagcagggttttcaacttccttttattttcgtgttggtcttgtttctctgagatgggacttaatttaaaaaatacaactttttttggaaataatttcaaatttacaaaaagttacaatattaaaaagagttcaaagaacatctatatcatttgcttgctcttgtacatgggtgagttttctttttctctctctctccatatacacagtctataaaaaacacacagaggaaaaatacaagaaaaaaactttcaacccatatcaaggttttatgattatagttaaaaatatacatatcaaaaagtcaaactaaaattttgcagtgttgacactgccaaactattcttttaaggaacattggtgttctatcagctagtccagtgatttttgtttttttaagagacagggtctctctatattgcccaggctggcttcaaactcctggactcaagtgatcgtccattcagccttacaagtagcagggactgtaggcaagtgccactgcacccagctcagtgattcttaaactttgaaaatgtgttgaaagttatagaccctttctctagaatcatgcatgtatgtgaatagtttgcatatagtttcagaggtggatgatggtccatggagttcctgaagaaaagtaaaggaaaaattattcatacatatggtaggcagaataatggcctaccaaagatgtccaaagatgtacatgtcctaatctctctgggatttgtgaatatgttatgttacacggtgagagataattcaagttgcagataaaaattagggttgctactcagatgatctgaaaatagattattctggatcacctgaggaggcctaattacatggtcctttaagtgtgtaaaggggaagcagaagaatccgtgtcaatgatgagatgtgagaaagccattgctgactctgaaggtggaaggaggccatgagccaaagaatagttcatgagctctagaagctgaaaaaggcaagaaaacagactctttaggaatgcagccatgccgacatctctattttagcccgctaagacccattttgaatttctgacctccagaactgtaagataatacatttctgttgttttaagccactaagtttatggtaatttgtttaaggtaattttaaggcattaggaaactaataaaggatgtgaacagtcattttgtatgtgtgttgatgtgtggttatggtagtaattaagtgtgtgtgtgtgtgtgtgtgtatacattttttaataccacctaggtatttttctttttttcttttttttttttttttggagttggggtctctgtctcctaggctggagttcagtggagtgatctcggctcactttaacctctgtcttctgggctcaagtgatcctcccacctcagcctcccgagtagctgggaccacaggtgcccgccaccacacccacctaattttttgtattttttggtagaggtggggtttcgtcatgttgcctgagctgttctgtaattttttgcttaacaaatccataaaaagtacttctttatcttttttaaaggtctgtgaagtgtcagacctcaagatggacaactatttaattagatatagcatcttatctactactgaaattatattcctacacaatttactgaaatttcttggtaagaatgtgatgagcttttcccaaaaatttacccatctacattccctttataaaacgcaaccttttgatttacagttatgttgacaatatctttgttctgtcaagtatcttggataatttcttctccctgtagctaattgacagattaaaaacaattagaaaattctcctcagaggttatttaaacagtatataattatatgctttacttaggtatcagcttaagagaataaactgtttagaaacagatttattttgcagttggtagattattttaatggaagatcaatacaggtacttaattatctataaatgttttgtgagcaagaaactttttgtgatttttttttttaaaggataccaatattagttacatgggggaaaatttatacacacatcaggaaatgtacttgttttaggaaatttacatggtttagagctccaatttctagaagtggttagaacagattcatatatagcattttcaactttgattctctgaatatactgagttaagattttttttcctatatgaggagttattttgcttacagtatccttgaccacaaatcatggaactaaactaaaattcatttacgactaataatggtcaacatttattgaggaagtatgaccttttttattttgttgttgagacagagtctcactctgttctccaggctggagtacagtggtgtgatctcggctcactgcaacctctgcctcccgggttcaagcagttctcctgctgcagcctcccaagtagctggtacaacacgtaccaccaggcatctaatttttgtatttttagtagagatggggttttgccatgttggccaggctggttttgaactcctggcctcaggtgatccgcctgccttggcttcccaaagtggcgtgagccactgcacctggctgggaagtatggatttttttttttcacgtaccaataatgattcctggaaagggataaacccatttgtttttgttaatcttctttctaaaattaatgttaaaatgttggccttaaatgagatattaaatatggtgttttgaaacactgcttttgaaataatatatactttgtgagagcttaataaaggaaatttagcctattcaggattggaatcatagaatcttaagagttaaaatatgtctcttcttactgccacccattgtctaagtgtcccctgaggctactgagaacaaatttattctcacctacctacagtaaccctttaaatatgatcattatttttttgaatcatgatgacagcagaattcccactcccaaacatcctttaatggcttctttaatgtgtctttaattgttttatgctcttaaacccttcaccatcttggtttccttcttctggttattcttgtttaacaaggcccctctcaaacagtgacacccagaatggtattaattacatatatatactatatatagtctgaaatataccatgggtgggtattaactttttgtcctatccattacaatttttgtattttaagaacaattttaggtcgtaacagggactcataaataatggaaatggatgtattggaaatgtatcaaaagaaagttttaaaagttttaacataaactacaggagtaaaaaacttaaaaattacaacttatgactttctcagagactttattgagttgggatgaactggaagttgtggaggatagggaaccaggaatctattacattcatgtcttatttatttttaataaactggagtaaaattgagactggtctgtaggagatatgactgcggatgtgtgatcagttgtctaagacagttgagcctcatactacatttctattcttaatatgtaaaatgtatttcttatagtacaaatcccttttggctaggaaattcttatatgtttaaaataaattaaccttttaaggcagctctgaagaagtaatttattttaaataggtgagcagtttatagctcttatgggaatactttttccttattttttcatcataggattagaccctgtgtttttaatttaagtcctttaatttttgctgttaatgtttaatttacttgatgaccccgtactgttaacttttgaccaagtgaacttgggacagtatatacaaactgtttacctaattttaaggaaactcttttaaaaataagataggtttgatgtgaaacagaacattaaattcatttcaactttccatgtagaaaaatatcatatgtatttaatcaaataacttttccccccttattggaggatgtatttttatcagcatggaggttttttgttttttaataattagatgtttatgccattggcaaaacaacccaaagctgaccatgaccaaactgcaatacttttaataaactaaaagactactaatatagtagatataaaaccctttcctgataagaaatttttatagcgtatgactgaatctaacaattctccctctacctttatttatgctcgtttactttcttttatagaaaattgaaattcctaaagtttaagtttttagatgtaaaaaatgttagtatatacagttaaattaagttcaaggtttcttttaaaccacttgatgtaatttactttgtatatagcttttatttgcctttttaaaattattattacaatttttttagacagagaattgctgtatcatgcaggctggagtgcaggggcgtgatctcaggtcactgcaacctctgcctccccggttcaagcaattctcgttcctcagcttcccaagtagctggaattataggcgcaagccaccatgcccagctaatttttttttttttttttttttgtatttttagtacagacagggtttctgcatgttggccaggctggtctcaaactcctgatctcaagtgatcctcctgcctcagcctcccaaactgctgggattataggcatgagccactgcacccagcttatttgcccttcaaactagacctgtggacttgcttttgaacattttctcccctaattatagaatacatgtgcattaaagaaaacagaaaaaaatcaggaatgattggaaggcattgcttctgaaggcctcttaacaatatacctctctcctcatctcctttcccagttgaccaaagaaggctccgtgtttgtcttttatgtatattagcatgattgaacttcatccatttagccttattgaatactgtactttgtttctcttcaggaaaattacagtttgatatcttgtgggacagaaggtttcatctttcagtcatcagagagcaaagtaggaaagacttagagaggcaaagtccctctgcacctaaggatacactatttttactctaagggggccatgagggtttatttactttcatcattttggggtgaggaatggttagaaactgagggagcataaataggttaagtattatccatgacagtagggtgggagttaatggaagctcatttatagcagttctacttcctgatttatgggtatgtgtggtgcattttaaagagattctggtgaactaacaaggtgtaataattgtattttgttatatatcatattattgactgccggactgcttaacatgcagcttaataattattatggatatctttaaatatgccacattcactttattcagaagtgaactgataagcaacaagctgccatgtgctgaacagtattaggtactgggataaacaagggttttaaatgctgagaatagtgtaagctatatatgtttctgtatagccttcatggtttgctaataaggtaatctgttgtcatttcataattgaaatactagggggaatgttgtaaaaatgctctttattattgttatttaaatggaagtattttgtgtggttttatagtcatggtgggaaatcatgagtttttggactagggtagtgatggttgggatagaagatgagggaaaaatctgtaatgcctccctggtccctggcctggttgtagagtacaatggtggtatcattaaccaggacagggacaagtggaggaggctcatggcttttgagagagagagagagagagagagagtgtgtgtgtgtgtgtgtgtgtgtgtgtgtgtgtgtgtgtgtgtatgtttatgggtgtgagatggaacgctgggacatgagagggagatgacaagtccagtgaggacattttgaatatgaaagattaagcactcatgggatacctaagtagggaagttcagtaaggagctcaatatatacgactgaggcttaggagaaaggcctgggctggaaatggatatcactaaataggtggtagttcagattatgagggaaatggatgccattgctcatagagactaaacatagaggaaatgagaaccaaaattagtaaatgggcaaagtaagaggaagcagcaaaagactgagaaggaatggctgagagaggggcaggaacaccaacagagctcagagttaaaggagccagtggtagagaggtttcaaaaggaaagaagtcaggagtgtcagaaggtaaagacaggccaagtaaactgaaaaagataaaaggatttggcagttctgtcattagtaatgtttgccagaacactttcaatgaaacaatggtggcagaattctgtttgtgttgagttgaaaagtatattaaaatagggaaaggggctgggtgcagtggctcttgcctgtaatcccagcactttgggaggcccaagcaggcagatcacctgaggtcgggagtttgaaaccagtctgaccaacatgaagaaaccctgtctctactaaaaatacaaaattagctgggcatggtgacacatgcctgtaatcccagctactcaggaggctgaggcaggagaattgcttgaacctgggaggcagaggttgtggtgagccgagattgcggcattgcactccagcctgggcaacaaaagcgaagccccgtctcaaaaaaaaaaaaaaaaaaaaaagagaatggttacaataaatgtgtattatttcaaggctcttgacattttcttaaaaacaaaagatgataattttagggaggaggttacagaatagagtaggagatctacaagagaagagaacttaacatttttataaagtatggggacagagtcatcagagaggagaaattagaaaggtatagtgagatctagtaggagataagggtgcaggtaaaggaattaacccagaaaagagaaaggataccttttcctctgagactagaagggaacaggtaagatggttttatgtataacttgtaaatctagagcaggaagttgagggaattcatagctaatagttttagtttttattttttttctgataaaggagtcataaaagaggtaagggtagagctgaagtagcaagtttgagttgaagtaagatggtacaaaatatatgctctaggtaatgggagagggaattaatgagggaggaaggttgttagcagaagagggtgatgtacctgagaacctaggctggataggaaaagacacaaagcatgtgggagattgtagtttgaagaaatgagattgtagtttgaagaaatgaggaatgggtatcaaaattaggtaagaaagcaggtatttagggagtaatggagtaaaaaaactgcaaggataagtagttgtagtcagagatcaatatattggactcttaaggctgtagaataatttcttggttatcagaagatagagggtgtagctttgggtatggattactgaatgaagtggttttatggagtcagagttcatagtttttcaatgggttttccatatggacactgaagtgggaggtgatggcagaaaatgcaggggaggcagatactgtcagcaaagggccagagtcctcaacaaaatggaatgactgggtaattaataagaatgaaagaaaggagtaaaaaattcccaagattgttcatcatgccttttttttttcctcgtaaattaagagacatgagggtaaggactatgtctgaattaatccaacaaatgcaaatatttgttgaattaataagtgaatgataaactcatgttgaataagtatttcagaaaacttgtttttttcttattataagtagtcgatattaaagaaaatacaaataagcaggatgtaggaaaaaataatcccatcagccagaaatacctacccccaacaccctttgttattaaactttttgcttaaatctgtttgttgttcatatatttttttcctagcaatattcagttgtacactttaacatctaaataagtattttcttatggaatataaggatgtactataatttaagcagttccttattttggggcatttatattgattccacccaagtttcttcaactggtaaaacgaaaaacctaatagctattttttttttttagacagtttcgttcttgtcgcccaggctggagtgcaatggcacaatcttggctcactgcaacctctgcctcccaggttcaagcaattctgctgcctcagcctcctgagtagctgggactacaggcgtatgccaccatgcccggctaatttttgtatttttagtagagacaggatttcaccatgttggacaggctggtcttgaacttctgactttgggtgatctgcccgcctcggcctcccaaagtgtggggattacaggcgtgtgccaccacgcccggataatttttgtatttttagtagagatggggtttcaccatgttggccaggctggtcttgaacttctgacctcaggtgatctgcccgcctcagcctcccaaagtgttgggattacaggtgtgtgccaccacgcccagcataatagctaaatttttgccttacttattttcttaggattcttagaagtagattttctaggaggggcttcatagagatcctatttatctttattttagggccatttctaacaggcttgtttatgtgcattccatccaggattggaatcctggacaatggacagtgttgcaggtattgactgatgcaggcatgctgacagccacaaaagtgagaactgttagtcacaggtccttcttcacaaaaagaatgatgggtatttttaaaacttggaatcaagtatagttttcatgagcacagtaagagatgattcatgagctgaatacaggatatagtagtcaattcagaaatgcatattcaaattaaataaaaaactcttacaatagtctatatttgttgataatactgaactttagtagaggtttttttccataaattttaaaactgtggcaaaatactcatgaagtttatcaacttaaccatttttaagtgtacagttcagtggtattaaatacatccattatgttgtaaccatcaccaccattcatctttgtaactagtagaggtattaatataccaatcttgaatagtcatcaaagtcactctacctcaaacttttccacaaaagtatggttagtagcagagaggagtgaacaattgccttaaaaacttggtcccaagctagaattctttttagcttcatgttttgtcttaaatttaatgtaaatgtagtgttacataccataatgttcctatatttagtaaaatacaatgattatacattttttcaaaatctctgagggaggttgatccccttaactttggcaattttgagacgaagtcttgctctgtcacccaggctggagtgcagtggcatgatctcagctcactgcaacctctgcctcccgggttcaagcgattctcatgcctcagcctcccgaatagctgggattacaggcatgtgccaccatgcctggctaatttttgtattttattagagatggggttttgccatgttggccaggctgatcttgaactcctgacctcgggtgatgcgcctgcctcggcctcccaaagtgctgggattacaggcgtgaaccaccatacccggccttcatttttcttttacggtttagccaaggctatttatagtagtgtatgtcaaggagtagactgattgatgttcaccctcttcaaatgtgagtgtcacagaaactgaaattcacagagtaaaaatttagaagtatccttttatattatatttgctctagtaatcaagcatacttcatcattattaatgctatgagacaatcttattgtacaaataaagagaatgatttcatgtgctggctagggccatagccccacctttccaaagagtatcaacttttcaactatccatgcattatgactccagagacttgtaaaccctctcaggtgtaataaattttttttttttttttgagaggagtctcgctctgttgtaaggctggagtgcagtggcgctatctcggctcactgcaacctgcgcctcctgggttcaagtgattctcctgcctcagcctcccgagtagctgggactacaggtgcgtgccaccacgcccagctaattttgtgtttttagtagagatggggtttcaccgtgttggccaggctggtctcgatctcttgacctcatgatccacctgcctcggcttcccaaaatgctgggattacaggtgtgagccactgtggcccggcccagctgtaataattttgttcttcatgcctgatcccatttcaggagattggttattacattgaaggacagtagcaaaattggaactaaagtctgagtctcttaactcctagttgagggtctttccaattacaccaaaaggaaaagagttacatataacaagagataagacttactcctacctgcccccacaaaaccactttaagccatcctaagaacggtctcttttttctccctccctctctccttcccttcacctttcctttcttcttcttcttaccttttttgggggtaactcccaaccaccccagttctcagaattaaaaggttaagaatattttagtactcttcaagatacaaagtagactattagagttttttgttgttgtttctcaagcttgggacataaagctcagagatcagaacaacagaattttagaaaggaatagataggatacatgaaaaaggctgctggaatatgaaaaaactggagtaaaaataagcaaatcaatacttctgaaatgaagccttcattggtagaaaagagtgtaggtcacaaaaatgaattagcagaagttcttgatttctaattattgaagattcctatctagtggtattctaatatgcttaccaaattatgagttgcattactttttaaaaacctaaaaccaagtcaagatttacagagtgaccccagtttattttgtttggtaagttttcagttccagttattaggcaaaacaaaaattgctaatacgtaacaatgctgaaacaggcgattggtagaataaaacaaaagggattcatacagcttttgtactgtcttcttgaaaaagtcatatttggccataaaagctaatacatgctttaggaatggaaatgatttaacctgattttttcaagtaagatttgttcaagaataatgggcttatgttgtcagttgtgggttcaagcagtaattcactttggactgcttctattcaacagtatgctgtctgtacgtaaagagttacatggaatttaattttagcattggaatctatttgagataccattatcttttatattcaaatgaaaaattatgggcctctagaattaagtgttactaacctgatatagatagaataatagctgtatcaaaaggaaaaaagcaaggataatatgtgtatagggtttgaatcatacagtctcactagagatgtgttttttaaaattgtgaatgtttgttgattcattcaaaaccgtttgaaaattgtgagggagccagaaaaggggagaatatttggatgtataatttagatgtatagtttgcttgcttatcagggaatagttaagttccttttttttctgtatattttagttggtgaaattaacagtttttgttcttttagattaccctgtaaaagaacatggcattttatagatgagataattgaggcttatacatgttgagttataatgtgtggaggagtctgatgtgcatccaagtctgtctgcccctaatgtctctgtttttaaccattatcctcagaatgaaatacattcatatagtagagaccaattcttaaacagaagtcatctttactcacaaaattaatctgtgaagtacccactgttctcagtttctctccctctcactttttctttctagtgctttgcagtttttaatgaaagtgaatatttttttcagaaattattattttcatgttttttattagaggattaaatttgttgctaagatcatttagtaagtcttttgcagtcttttaagattagacttaagtgtaaacttaaagattgccttgaagtatattatttagctatattgcattattattccttatgtaatgagctatagactgagcactccttgacaaatcacaagaataagacccaaagaatcaaactttcccaagtaacttaactgcatcccaggacaaaactcaggaacatttagaggaacagaagactatccagcagccaacagataaaattcacaatgccttgccaggcacacaaagaagccagaaaaaataatccacaatgatgaaaacaatcaatcatctgaaagtgaccttaagcagagaaagatgttagaactagtaaagacattgaacattattatagctatattctatattttcagaaagtagagacatgaaagacatttttaaaaactcaatgcagttctagggatgaaaactacaatatctgagatctactaatggtatttgtagcagattagacatggcagaagaaaaggttagtgaacttgaaggatatagcaaaagaaactactcaaaaatgaaagagaaaaaagaatgacaaaagcatcagtgagctatgggacaaacttacagaatccttatgtaaacataatcagaggcatcaaaggagaggagaggcagatacaaaagggatatttgaaaaagtaatggccagaattttcaaattggacaaaaactattaactcacagatccaagaagctcaacaagaagaaaactacaccaaggaatgtcataatcaaattattcaaagccaattataaaaaatatggaaaacagccacatgttatagagtaacaaagataaggttgacagcagatttctcattagaaacattgcaagtgaagagacagtagaacataaagtactgaaagaaaaaaatgttaacctcagcaaaatatcattcaaaaaacaaaggcaaaataaagatgttttcagacatacgaaaacaactctttaccatcaggtagactgaaggtagactgtggtagggtgaagatgtatactgccctagggcaaccagtagaataacaaaacagttatagctaataagtcaacaaaggagataagatagaatcacaaaaaaatactcaacccaaaagaaggtggaaaaaggaacaaataagtagtgaaactaatagaaaaatggcaaggcaatagactgtaatcatatcagcaatcacattaaatgcatattatctaaatatcccacttaaaaggcaaagattgtcagataaaaagcaagactgcttttggacctggatgaacaggaggcaccatcacggaagttgactcctgccacaacaatgactgaaaggttcaacaccaggaacccaagagccaggacatctactgaaggctgttggttaagctgtatatgtttctggccagaagaaactctaccttcaaccaagttgtggtgaagaggttatttatgagttgcaccaaatggccatctctgtctctttcctggatgatctggaagatgaagcttcctggccaggaaaacaaaacagctgtggttgtggggaccatgttcaggaggtgcccaaactgaaggtgtgtgcactgcacatgagcagttgggcctgcagccaaatccccaaggctggggacaagattctcacctttgaccagctgaccctggacaccctcaaaggctgtggcaccatcctgctctctgggcctcacaagggccaagaagtgtactggcatttcagcaaggccctgggaacccagcatagccacactaagccctgtgtccactccagggaccagaaattcaagcacatcagaggctgatgggccagccaaggctacaaaaactaaccctggatcctctatcttattaaaaagattttggcctgggcgcagtggctcatccctgtaatcccagcactttgggaggccaaggagggcagatcacttgagcctaggagttcaagaccagcctgggcaacaagtgaaactccatctctataaaaaattaaaaaaaaaaattagttgggtgtggtggtacatgcctgtagtcccagctacttgggaggctgaggcaagaggatcgcttgagcccaggaagtcaaggctccagtgagccatgatcgtgccactgcactccaccctgggcgacagagtgagaccctgtcttagaacaaaacaaaacgaaacaaaaaattttggatggtgggggaaaggaaaataaaaaacaagatccaactatatactctcaataaaaaaacacattttaggctgggtgtgatggctcccagcactttgggaggtcaaggcaggtagatcaccggaagtcaggagttcaagaccagcctggccaacatggcgaaatctcgtccctactaaaaatacaaaaattagccaggcatggtgatgggtgcctgtaatcccagctacttgggaggctgaggcagaagaattggacgaatgcaggaggcagaggttgcagtgagcagagatcatgccactgcactccagcctgggagacaaaacgagattccgtctcaaaaaaaaaaaaaaaaaaaagaaaaagaaacacattttacacacaaagacataataacattaagaataaaaggatgaccaggcacagtggctcatgcctgtaatcccagcactttgggaggttgaggcaagaggatcacttgagcccatgagtctgagaccagcctgggcaatatggtgagatcctgtctccacaaaaaattagccaagtgtggtggtgcacacctgtagtcccagctacttgggaggctgaggtgggaggatagcttgaacccaggaagtcaaggctatagggagtggtgatcacgccactgtactccagcctggagtgactcaaagtacagtcactttgagacagagtgagactctgtctcaaaaaaaaaaaaaaaaaaaaaaaaaggtaaaaggatggaaaaagatatatcatactgatgctggcattagtcaaaagaaaactggtgtggctatattaacatgaaataaagtagatttcagagcaaataatattaccaggaataaagaaggccattttataataataaaagggctggttaatcagaaggatacaataatcctacatggttttgtctcaaataataaaagcttcaaaatatgtaaatcaaaaactgacagaagtgcaaggaaaaacagacaaatccatagttagagatttcaatacccctctttaaatgattgctaaaacaagtagaaacttacaaggatatagtaaactcaagcaacactgtaaccaaattaacagtacaggttgagcatccctaatctgaaatacaaaatgctccaaaatccaaaattttttgagcaccaacatgacccaatacgttgggtcctattcccaggatctcttattatatatatatatataaatgttcagaaaatccaaaaaactttgaaatctgaaacacttctggtcccaagcattttggataagggatactcaacctgtaatagaatatatattctcttcaaagtatacatgaaacatttacccaaatcgatcatattctaggccagaggttatcaaactatggccctgaggccaaatgtagtctgtttttgtatagtccatgaactaaaaatggtttttacattttgaaagatttctttaagaagaaaagaaaatatgtgacaaagatcatatgtggcccacagagtttaaaatatttactgtctgaccctttagagaagtttgcctgcccctgttctaggccataaaacatgtctcagtaaattttaaaggattcagataatgcagagtatgtcttctgactacagtagaattaaaattagaaatcaataacagaaagctgtctggaaaatccccaaatgtttggaaacaaaataacatgctactaaataaccttctaataacccattgattaaaataggagtgcagtaaaattagaaggcattttgagctgaatgaaaatgaaaacaaagcatatcaaattttgtggcatgccactaaagcagtatgtaggaagacataagcaaaatgcttatattagaaaatataaaaagtctcaagttaatgagcttccaccttaagaaattagaaaagaagaacaaattaaacacaaagaaacaaaagaaataataaagatcaaagtagaaataaatgaaatggaaaacaaaataaattgagagtattaatgaaaccaaaccctggttctttgagataaataaaattgataaatcttttgccacgctgatcaggaaaaaaaaaaaaaaaagagagaagacacatattaccaatatcaggaatgagaggtgaaatatgacaaattctacagatacttaaagaatagcaagggaatattatgaaaaaccttaagcaaataaaattcaacaacttagatgaaatggtcaaattccttgaaagacataactaccaaagcttactcaaaaagaagtacagccaggtgcagtggctcacacctgtaatcccagcattttgggagtttgaggtgggcagatcacttaagtccaggagttcgagaccagcctgggcaatgtgaagaaaccccatctctactaaaaatacaaaaaaatttagctgggtgtggtggtgcatgactgtagtcccagctacttggggggctaaggcgggaggatcgcttgagcttgcgagattgagccctgattatgccactgcattccagcctgggtgaaagagtgagaccctgtctcaaaaaaaaaaaaaaaaagaaaaaaaagaaaaaaaaaagaaaaaaaagaaaaaaaaaagaaaaagaaatagataacttccaaagctatgtatctatttttaaaaaattaatagttaaaaatattctcacaaagaaacactagtggattcttccagacacttagggataacactgtgtataccaattatatacaaatcttccagaaaactgaagaggaaggaatacgtctcagtttatttttgggggccagcattaccctgatacctaaaccacacaaagccattacaagaaaagaaaactatagcccagtttccctcttgaacatggatgtaataattctcaacgaaactttaacaagtcaaatccaacaaaatataagaaagttaatattactggatgaggtttatcccaaaaatatgtcattgctttaaattaaaaaattaatcattgtaagtcactatattaagctaaaaaagaaaatctgatcatttcaatagacacccaaaaaatctgacaaaatcgtatatttgttcctgattttaaaaaaccaaaaacaaaaaaaacaaaaaaaacaaaaaaaaaaccaaacctgttagcaaactaggaatagaagggtactttctcaaccagataaaggacatctataaaaatcctacagatagccttatgcataatgatgaaaaactgcatgctttccctttccccgtaagataaagaataatacaaagatatctgctctgaccactttcattcaacatcagaggttctgtccagggcaatcaggcaagaaaaagaaataaatcgcattcaagttagaaaggaagaaatacaactgatgatagccatcattcctaagagttccccttgcctctttataatccttgcctcctcttacctctctccccaggaaaccactggcctgttttctgtcactagagaccagtttgcattttctagaactgatatatgtggaatcatgcagtatgttactcaattttttttgtcagtaattggtagcttatcttgcaatcaaagttcatatacaaccatttgatcttcattccattccctcattagtccatagaatgtcaatcaatttttctttcttttatttatttattttaacgaaacagggtcttgttgtgttgcctaggctggagtgcaggcttacttcaacctccaactcctgggctcaggtgatcctcccgcctaagcctccagagtagctgggactacaagggtgtgtcaccatgcctggctaactttttaaaattttttgtattgatggggtcttgccatgttgcccaggctggtctcgaactcctgagctcaagacctcccaaagtgctgggattacaggcatgagccactgcgcctggactcaatttctgtatgatgatgactttcatatgtacatcaacaggccagatagcttatcaagaaagcttctcctctgtcttctagtaatatcccacttagatctgacattatttttttccttcaaggtatttcttccaaatttcttggctgttgttggtgacaacacaagtttttggacctttaagtttacaatcttaggttcatttccttattttatttcttccctataggtaaatgatcactaaacttgttacttcttatagttacttctttgtaaggcactgcagatatgtttcttttcatttttaaaattgcccatttaattcaagctattaaatatcaagcttgtactatatcaagagtactatatatcaagactatagcctcttgatattttccctaccctcccatcctgccatacccatgtctccactagcctatataaaacataaaatacttttcatcaaactctctgtagagaagtgttgctgggcgaataagaaaaacctgattgactagaaagcaaatgtaaatgtaatctcctttcttttcagtgattctaccagaaaggaatgaagaacagaaccttcaggaattgagtcacaatgcagacaaatatcaaatgggagattgttgcaaggaagagattgatgatagtattttctactagccattgggaagataaaaggagacagaagattgaagcctttgccagccattctttccctttttgcttccaaactcctcaactgggaaccttcatatgtgcagtatttatattggatcatactggtgattataaaagttcctaggaggctagaagagccaaccaacagagaagggaaagcagtctgttctgaacatagggacataagttcattcatgccaagtatctttccagcatgtttctcccatttagaatatctagcatgtaaggcctttcaatattaatataagcccaatatcagctctttctctttgtatttcatctctttctactctcctatttgtattttgtgttcctatcaaagtgtcgtatctgggagatgacctgccttatcctgttctataacagttttgtttgctgctgtgtctttagaacagtgcctggcacacagtaagcactcaataaatctttgatgaatgaatgaatggttatcttttctctctggcaatccaaattcaccactccttaaaaattctacataagatttgctggctgggcgcagtgactcacgcctgtaatcccagcactttgggagactgagacaggtggatcacctgaggtcaggagtttgagaccagtctcaacatagcgaaaccccatctctactaaaagtacaaaaattagccgggcgtggtggcaggcgcctgtaatcccagctacttgggagactgaggcaggagaatcacttgagcccaggggggcagaggttgcagtgagctgagatcacgccacttcactccagcctgggcaaaagagcaaaactccgtctccaaaaaaaaaaaaaaaagatttgcctattccagcagacttctacccaatatcaatctagatttaaatcacttgattttccacatccctttagcaattatgtatagtttgcacttcattaacctacccttatttatgttacttctcacatacacccatatctcttctgtattttcaatcaaaagataatgcctcaaatgttatatatattgtatgtgccactcaacagtgcctcatatgctgcaaaaaaaaaagacagtaaacaatcggggtacctttttgtcttttaagccatattttctgggtcagtgtggtctttcaagggagtttagacaggctctattttttgttacttcactcctatagtatgtgactgtaaattgttccttcagtgttcaatttaagtacaaactaaagagaaacagtttcctaaagaaaaacattttaaagttacagagacacctatgtgttcgtaacatttctccagaaatatttgaagtaacgtaaaacttctggactggtcagtttaaatattttcttggaatttctatagaaatttctgtggaatggtgttatattggaaatattaattaactataagaagactcctacttcttcacagagaacaagcagggatatcctggattttcacagtatttaggccactccttaattgtctcatgaaggaattaaggtagtggaacacattcaagaattgcttaggtgtcaaaataagacaaagtgtaacagtttttttctgtagtagatttttaaatagttaaaagactctgccctctttatctatactgtattctggcaataataaagttgggcagcctatacataaaagcaatttctaacaatgccaaattaacagcagtttcttggccctttcctttccctccatgaaagttacaatattaggttatttcacaggtttcctccatgccccccatacccaacctaaaactgtgttaggctgtcaaagaaaacaaatcaggtaagattagtgtttgcctttacgcagtcattctaagtacacataaaatcatacataatatgaaaatacagcaggaagagaaacatcaaaccatagaactgagttttagttttactgacatttatatggcatacttcctgtttttgatttcagaagtgcaaccatgcagtgcttctatgaaaaactgaatagttgagtacagtttgaggattataacaacttatccaaaggaaacaaacagacctaacttactgctgttttcatttgtggaactgctatctttgttgtaaaaagttgagtatttttcaaacatcatttaataatagggtagcccctaaaacaagtaaggagctataagtctgagttgtgaatttgactagtaatggaataagaaaaccaagccaaactccatctaaatatgtatgtaaaggtaatgcttgtaaaaatttgctttttcctcattttgagatttcagttgccagttgactattggtatgcaaaattaacaattctgcctaaaggaggtaaacgatagaggttaattcttaaataaaagtccctttgtttcactattaactttttctatttgaagcataattgtgtcagctaatttattttttggtaaccacttaggaatttgggagggaggggggcactcaagtaagcaatgacagccagctagacatcaaaatccatgttctcacttcatggccgtacagataaatttcatttcctagcctctcttgcagttagatgtgggcatatgactaagctctagctagtggaatgagaatggatgtcaactactttaagctctttaagtcaactaaagaaatcaactactttaagctcctgtccctaaaaaactcccaacagactgacccctccaaggaaaccttggaagttaggtcctaaatgcttaggtacagtaagaccttggaaactactaaagaaatagtaaagtaaacttgttttgcaagaacaactttgagccactatatattttggggatgatctattatggcaattagcctgccgtcattaatttgatctataaaacatatatgaagtgtccctgtgatacacaactccagtggtcacacactgtaatgtatgcaactgggatttttctgaagcacaactgagaggctacaggtatgcatacatatggatataggtaaatgttcctcccaggagtggtaaaatgctgtggctttgccaactaactccagcttctctcatgggttttattgtggatgattattgatttgtgtaaaggaacttcccttttgtgtctgtggtaatagataaaggtggaatggatcctccaacaagaatcttgaggggaaaatatatacttatgatcaaaataagatatctttcttgggtttgtccaatagtgatggctacatagtcttcctattaccttttatctacaggcaggcagtaggccataatagtattagaagcccctccctttctccaaaaaaaaaaaaaaaaaagtgctctgagcagtaaagatatttaatttaacatatctgcgcttcatgtttctcatctgtaaaatgagagttggattatatcacttcaaaagtttccttttttcactaaacattctcccatctatgactacaatgtccagagctaatggtagaaatatatatatatatattttttttttttgagagggagtctccctctgtagccaggctggagtgcagtggtgcaatctcagctcactgcaacctccgccttcggagctcaagcgattctactgcctctgcctccctagtagcggggactacaggcacgcaccaccatgcccagctaattttttttttgtatttttatagagatagggttttaacatgttggtcaggatggtctaaatctcttgacctcgtgatctgcccgccttggcctcccaaagtgctgggattacaggcatgagccactgcgcccggccaaaataattttttttgttttctcttttattttgagacacagtttcgctctttttgcccaggctggagtgcactggcacgatcttggctcaccacaacctctgcctcctgggttcaagtgattctcctgcctcagcctccggggtagctgggattacaggcgccgcccccgccccgccccgccgccaccacccgctaattttgttatttttagtagagacggggtttctcagtgttgatcaggctggtctcaaactcctgacctcaggtgatccgcccacctcagcctcccaaagtgctgggattacaggtatgaacctccgcgaccagcctatttgaaataattcttaacatgagcatttcttcagatttcaagttgatattacagaagcgcaagtgcttcatagaaacttgaaattattttaaaaaaatgtttaactctcaccaaggcacaagagaggttatactcttctcccaaacaagctattaaattgaaaggattttaaacttacccaaggttttttagagtagttttattattattattttatttattcgtttttttgagatgaagtcttgctttgtcaccaaggctggaatgcagaggtgtgatcggctcactgcagccccgacttactgggctcaagttatcctcctgcctcagcctcctgagtagtaaggactacatgtgtgtgccacagtgcccggctagttagagtaattttaaaacactgtgtcacttctctgatttctatactttactccatgagtggagaaataatatcaaagctaatacagaatgtgatagttattgaaataatactataaaaagtcaaaaactagacagcagattttatagtttttcagtgaatttaccagttaaaaaccttaaattttacttttcctaattgtatgtttataatgtttcaatgtaataacaattcatataatagcacattcaggatcatggcaaaatcagctaagtcatagttaacacacactccttgtctctacgtatgtggtgctaagtcatatttttggtatagctaacaaatgattttttgtctgtctgctggtggggttttaatctcctggatttcaactttggttaaagttaaaaaatacactatccagactttatacaggcatgaattggctttaattcacattcttttgctgcaggagagctgcagaaatatggacctcactcagggatgatactgttttagaaaggagaagggacaggctgtataacattgtccagagtggagttttcatgttgcgagaaagccatgtataggccggagtacatgagtaaaaggaataacaactcccccatcccctgccacaaaggaacaagacaggagagccaacaatagtattttgactattagttgacgagtatggattctaaaaatatctttacataattgcagaaattgaggaacaatctaaatgtttaaaaatgagattgataaataaattttggtatatctatatgttggaaagctatgcagatgttaaaaacaggttttcaaaactattcagtaacatgaaaaaatggtcattataaactactgagtgacaaaaataagatataaaactatatgtagtaattagcaactatatattttaaatacaggaaggaaacatgaatgttaacattggtttttctctggctggtgggattacagatgacaatacttttgtggtttccaacatttctctagttaacacattctgtttacaattttaaacattactttcaaagaaaaaatgtgatatatgtaaatatggttatataaaatctgtatacatatgtattttatttatgtatatcaaaaccagaccaaaaatactgagtttgatagttttcagattgacactgtaacagaatactttccttgaccctcattttatgttgagatctttatggcagtgaaagggctagagagaggcatgtactttcagagtttctgaaatgacatgtatagtatgaaaaagcatagaagcattcctcaattttcacatcttgaattttaatacaacctgtaattttgtacatactaaatgaatgtattagttttccaagctacagcattggtggccagttagcagttaataataatatttttcaaaggataataaatgaaaatattgttggccaggtgcggtggctcacacctgtaatctcagcactttgggaaaccaacgcaggtggatcgcttgggtccaggagttcttgaccagcctggggcacacagcgagatcccggctctacaaaaaaaaactaaaaaaattagtggggcatggtggcatgcgcctgtaatccaagctactcaggaggttgaggtgggaggatcacttgagcctgggaggcggaggttgcagtgagccgagatcctgccacttcactccagcctgggcaacagagtgagataccatctcaggaaaaaaaaaaaaaaaagttgaatatactagagatccaaactatttggaggaataattgattttctgggcaaagctaagaaatagaagttattcatactattggctacaaatttgtaaatatattggattatactccctcccaaatcataactcttaatcctgcagttttattgcatttttctgggtatttagttttgtgatgcttttctgggagactaagttaagagacccaaactcagattttaaaattagttcattttttttttgttttacatttttctaattatttctatcaatgaaactgtggcatattacaaaatttcaagataaataattttctgtcatgtttcataggtcaagtaaaaaaaaggttctgcagctaaaataaggcttaagggggaaaagtggccagcagcacattcaaagtttatgagcacagacttggggaatcggatagatgtaggttcaaattcttatactgggggtaggcaagaaagatgcataaacagtgaattttaaagtttggagggattttagagatcatttaatcaaaatccattgttttgcaaaggaaactaacaccctggaaagttaaatatctcacctaaagtttcaatcccagcattgctactcatgttatctaggtttgcttacttcccaaattcagcactctttactttctactacaatatgctacatttgaggttggaggagaccagattatagaaagtactgaaaattagaccaaagagtttgaacttactttaaatctgtctgtcttcattattattattattatttggaggagtggtactgggcacaatggaatgataatgatcagagtcataaaagatgtatagagatcctatgtttcctgaaaattctgtatcatactcagtacaactttaaacattctaggggagaacccaactcatttctttgtcttatttaaataatactgagtaatggaactgactagattacagttgataactattttattttttcacttgcttttgtcattttattccatgaattaatggtatacatgtgagattaaactgatgctgagttgggaggcaacactgtttggttctgaagagcagacttttccttaaaagttaaaatattaagaataaaatcaaaacaaaaaccttgagtctaaatttgaatatgactctcaactttaaaaggtagtccacataaatttttctccttagatttatttttgatattaaaatatatacagaattaaaagagaaatttaattttttacagcaaaatttttaccagataatgaagcttaaaaatgctgaccttttagctcatttctaggaatttattctagtttaggaaaatagatttatgcataaaaaagctcatggcaatattatttgtaagtaaagaaaataaataaccacttacaaggaacattatgcagacactgaaacttttgaggagttttcaatttatgatacatttgaggaaacatttatgatacgttgtcatataaaaaggcagtgtacacaagcaatttaaacttcatcagcttaaacaactgcctggaaatatgtcaactctcaacagttgcctctaaataaaggaactattggttattttttcctggtgtcctttaaatttttttttctttattttaacctattttcacactttcttcacttaccatgtactacttctataatcagatacgtgtttgtatcctaatgatatgttttcagtatcatcacgagtataaacatatgtgtgtatgtgtatgtgtgtgtacattgttgaccaagagaaaagttgatattacttaaatccaaataatgaaatttccaaaaaaacgcatacatatcctacaacttataaaattataatggtttaatacaatgtactaagtattctgacatagcaggctttcagtatattagttgatgatgaagataattagagaagggatacctcaattaatttaccaagttccttgagtctgtcagcaactctcccaccaagaatttaacaatataatatgacattaaaaagctggtttgtgtggtgcatttttgcaaactattattttgtatttttatttttttttttgagacggagtctcattctgtcatccagactggagtgcagtgccgcgatctcggctcactgcaacctctgactctggggttcaagggactcttctgcctcagcctttcaagtagctgggattacaggcacacgccaccaagcctggctaattttttttgtatttttagtagagatggggtttcgctatgttgcccaggctggtcttgaactcctggcctcaagtgatcctcctgccttggcctcccaaaatgctgggattacaggtgtgagccactgtacctggccttaaatgctaagttttgacacacaaaaaagaaaaatttgtccttaccttgttcattttgatcagctatgtgaggttcaggtaagattttacgatcagtaaaaaaggtttcttgtggaagtaactggaaataagatttaccttgtagggtcattataagttttggagatcatgtatgtaaagtgcctagcatagtgcctggctcacaggcactcagtaaatggtggctattataatacataatattaatatgactccttttgttatatttctatacataaggtgatctgaaaaaaatatgaagtgtagtcccccatttaaaaacatgattctagggctggatgcagtggctcatccctataatcccagtactttgagaggccgaggtgggaggatcacttaagcccaggaggtcgaggctgcaaggaagtgtgattgtgccactgcactcctgcctgggcaatagagtgagaccttgtctcataaataaatagatagttaaataaataagtaaacaacacatttctagacttctagataaaatggggagtgaaagcagaccatagaatctctctgcacatatactttacaagaagtatacaacagtatactttgtatactggaaaaacaacaataagaactcctttaaaagcattactagaatcagctagaaaaagaaaatgtccacaacctaaggcaacagaggccaaaagaatgcaattatttcaaaataaatttggaacagcaagaaatgaaataagacatagctggaaaagtcaaattctcaccaagaaggaagactggcagtcccagaacattcccctaatgaattcattcttttcttcttcaacatgattatgtcccatgtcttctctcctaaatctcccacatctctatgctcctcacttcaaatcttgtttcattgataaatagaagttgttacaagagaaacttatcttcccatatcaaatctaccaatgtgcttttatctgtactcaaatatactttcttcctgttacaaagatcaactatccttgctattatctaaggcaagcccctctactgtgtcctaggtcccatcttctcttgcatattcaaacattttgttcctgtgattatcccctccatatcctgcatcctcagtttctccctcatcaccctacagtccatatccacatctgcttacaaagggaacagaaggccctttatatcaaagttcttcaaagactctataattgcaatcttcacttccttacattatctcttgaatccattccagtttggattattgtctccacagcaccacttaaagtgctcttgttgagattaccaactaccttattgacagatcattttcctcttctcaaatgtctgcgagtcccagacatattcctcatacccaccatcaacatttccctccaaggtcatgtcttcaatctcttggtgttaaatactgtctaccatcataggactcctaacatttatattctatccctgatccctctgtggagctctggactcacatacaactgcttgtccagcaactccgctcaaatgtctaaagagaacctcaaagttagcacatttaaaataaatctcttgattttcttctcctccacattttacttctccctaagtcttccctcatgtcaatatatggcataatttctagttactatgggcaaacatgtagaaatcgtccttaattcctctttatcccagttattaagctgttatctttcagcaataaacctttccataaacactgctttgtgatgctgggactgggactctgcaaactatatttttactttgccagctgaattcctgctatgtttcatcaatatagagtagtagaggaaaactagaagtcaagaagaagggaaaataacttgccctccctcataggccttctgtacctgtcagtgttgccccagctgtgggccttcaccctgacaatggtagttagctcaaaattgcaactatgtttggctctcctagaccagtcccaacagaccctctcaggagtaccagcagcagatgggcagcacttccttgtcggaggtcagagttccagctctgccaagtccctcctcctagctcctgggttctaagaacttgaggtctttctgtgtttacccagtaccaggggcagtagctgcttccccaagttactctgttatctcagtgctctcttttcgcttttttcagtcctgcaacacccatttaaccaatctcttatactcagtgattgctcttgaaatacttaacagcagccagagtggttcttctatggcataaaccatctgcctgctcctcatcacacttagaacaaacatcaaattctttcctagggtgtacagctcctttggtgatctggcctacccatttctctagtctcatctcccacctgcttcccgttactcgtttggctccaatcactctctcttgaacacactgcttttccacctcagggcctttgtatgtgctcttctcatacctggactgcccaggtctttgcctagctcactgccttacttcactcaggcctattctcaaatgtcctcttagagatgcctgccctaactactctatctaaaatgcacaatcctctctgtacccacccccaacccgccccaattccttacctccatttctttttcttatcactacaagtttatttcttcctcttccatcctcaactgaaatgtaagcttcataaaggcagggatgtgatcatatttatcactggtgcctggcatatatagtaggtactcaaattctagttaataaatgaatttaagaaattctagaaattaataaattgtaatgaatgtagtagaaaagtagaccaaagaaattgcaaagaagataatgtggaagtaagacaaagctgacataatataagctgatccatctccctgcatatataatgcaacaaatgaatcagaaaaggcacttaaagatgtaatagaggagaatttccacaaaataaacaagtctgcagaataaaatgttcaatgtaaaatggacgtatattcaacattgaggcatatgctcataaagaatgaagaaaaaacttttcaaatctcttggcagaaaactaaatcacttacaagagggaggaaatcaagctggccttagacttcctctaagcaatattcgaagccagaaaacaaaggaaaaatgtctgcacagttttaaggcaaagccagcatgacccaaaactattatatctaaataagtaccgttcacgaattaacgaaaaaggcaaatatagcatctatgagtccatgtaggggaaaaaaaacttcttagtaaagagcagatgactaagtgatgaatcaaaattaataaggaagatatagagaagcaaggcatgttgtaagctctggatttttaagtacagatcaagatgagataactaaagaaatgaaagttacaaaacaaataaaccttaaaacttgactttgtaaaaataataacataaccaataaatatatatttttcatagcagagtctgctggcatttctgaatttgaaacatacggattaaaaagtctctaaagccttaatttttaaaatcttgggtattttaggaactaagctctcttgtgatgacgaaacattttcaaaaattcagcagttccttccatttctcttccaccaaattagaataattttaaatttaatactttccaatttaaaagtactgtgatgttctcggctgggcgcggtgggtcatgcctgtaatcccagcactttgggaggccgaggtgggcagatcacgaggtcaggagattgagaccatcctggctaacacagcgaaaccccgtctctactaaaaatacaaaaaaaaaaaaaattagctgggcttggtgacgggcgcctgtagtcccagctacttgggagactgaggcaggagaatggtgtgaacccgggaagcagggagcttgcagtgagccgagactgcgccactgcactccagcttgggcaacagagcgagactcgtctcaaaaaaaaaaaaaaaaaaagtactgtgatgttctcatcttaaataaaatgatcttatctgtataaatgcatagaaatatatcctaaactgatattcatttattttgatggtaaaatctaggatctgaggagatttaaaaactttcctgtaactttctatattgtttgaattatttataaatgagcatgtatttttataaaatcaatagccattatccataaaatagcattatacacaacaatgtgaatatacttaacactactgaactgtacccttaaaaatggtgaagatggtaaatttatatttaccatttataacttttgccacaattaaaaataataaattttaaaaatactattgtaaaatttataaaatagctaatgcacaatagctttacagatgaatttacagattctaccaacatttgcccgaacaacttttccaccaaaatgtgaaacctcagattatacccttgcataatactctatatttgcctatacattattttagtaagcagagattattcactggcagatactgttataactatgccaaatgaaaagttacttatgaaaagtaactaataagttatgttactttattaactatccttgtgctgtaaagttgtaaatatgtcatttgatttaaatattcagaagaaaatcttttagctttaatgatttttttcctgattgttaaaataatatgtgctcattttagaaaatatacaaaggtaaaaatgaccataatcacagagtacattttggtgtactttttccacccttttcctatgcattttacatatatattatatatgcatttcctatgcatttttaaataaatgagaaagttttataaactaaaaatcttagtgtatattaaacattaatatttgtgtcattaagtatttttaatagatacatattttgttagattgatacaccatggtttattaaaccactctcccactgctgaatattcagattgtttcctctgtatagatactctagtgaatatgcataaatctgtgatttcatatctgattatctccttcaaattggttcctgttagtgcaactactgtgtcaaagaattggacatttttaagaccccagaaaggtaatagataagactgaaagttttttttttcttttttttttcttttgagaccaagtgttgctctgttgcccaggctgcagtgcagtggcacgatcttggctcactgcaacctccacctcccgggttcaagtgattctcctgcctcagcctcccgagtagctgggattacaggcacaggccaccctgcccggctaatttttatattttttttagtacagatggagtttcaccatgttggccaggctggtctcaaactcctgtcctcgtgatccgcccgccacggcctctcaaagtgctgggattacaggcgtgagccacctcgcccagacaagactgaaagttttattgcactcttagtggcactggttatcagcacttattttcaatctttgtcaatctgacgggggaggggtctctttctgtaatttaattaggcaaagttgaatttttactcacatattcataggaataactttactaccttaaggacttgtaattctttgtttttttacttaagaagattgcatttagttcttaatgtatttgtagacagagcattattactatttttttttttttttttttttttttgagacggagtctcgctgtcgcccaggctggagtgcagtggcgcaatctcggctcactgcaggctccgccccctggggttcacgccattctcctgcctcagcctcccgagtagctgggactacaggcgcccgccacctcgcccggctaattttttgtatttttagtagagacggggtttcaccgtgttagccaggatggtctcgatctcctgacctcgtgatccgcccgcctcggcctcccaaagtgctgggattacaggcgtgagccaccgcgcccggccgcattattactattagctagcaagatcatattttctttttttaagaccctaagctatgtgatcctggtatcatattttctgtattgaatttatttctccatgtgccagtttcactacactttccaaagtgctactaaatgcttagtttataaggttttaaaaaactcactgcataattactttaaaataatttcctcaaccctgccttcattcaaaatgtctggagacagactggcccacttccaattttctttcacgttatcattactgtgaagtcattctatagataggagagcattctggcatacagaaaaacagcatctgtgaaactatatggcacagtttggttggggttgttgctccttcagaaccgcattatgtaattttagtgtttacttaagctcctttgggctgcctccgtggtagctatgagctcacagagaagtaagtacagtttagatctgatagcaaagtctatcagtttatcctgaatgctgcatcctttttttgttgttgttgttaaatcattactgtatgagaaactttaaaaacaaaggtatagtttcttcattttattttttaaaaaagctacttcaaacatcattaagtaatacaccaaaaaataaagggttcataaatatatatttgctccttatctggacgtacttatttaaaaactcatattctacagtatgaacttacagtgtgattttgactcaacataaatataaatatgcaaaattaccaaaattagagggattagcctttaggaaagtacaaattattaaaatggcctaagcactatttctatttctaagtcatagaggaagcacatttaatatttcttaaaaaaaacaaaaaacaccaaagatgtataagttaatatcagcttagggagaattttacaagatactaggttataagaaaagattatttaaccttgattattcaatgaaaagtagtattttcagttttttagagcgataactcttgagtctctctaccaaacaaataattatatatgctggtttaaaataaaaataaatcagtctgcattataaaggtgggagaagtatccatttttttattgtaataatcaagtgttacgtcgccttcataggaaacatgcatactcttataaaatacttaaaagcctcaactgttcctttagaattactgattttgatgaataaacaagccccaataaagtcaatatcgtaacatctaaaagcatattgtcccttttgggaaatgtcattttgttttaattattattataaaattacttactggaatattctccatagcattttgctttttaattttgagaaggacattatgccattgattgccagcgatcctatgaggtccaaagttgggataactcatggagggcaaagaaaaaagttttcatcaccgtggaggtacagctactgtgaatgtcctacctagtttgggagagaagggtatgtgtgcacaggaggcctgacctggagggaatggacacagggagaagaaaggtgcaggaagattatgagacagactgcctactcaagttggctcaggattagctttgctggaacatttaaatgtttgggtttttatatttcattctaatataaaaaagagggtatttattaggtttcttatgtttaaacttttctaatgtacaaatgtactgtttataaatctatttatcagaagttacatgtggtgattttaaacatgttgcaaattgacactcctaccattaaaaggtggagtctaattcccctccccagaacacatatggccttagtaatttgcttttaacaaacggaagtgatggatatgatgctgcatggcttctaagactaggttataaaaaatgatacagttttaccaggtgtgatggctcacgcctgtaatccaaacactttgggaggccgaggcgggcggatcacaaggtcaggagatcgagaccatcctggctaacacggtgaaaccccctctctattaaaaatacaaaaatcagccaggcgtggtggcacgtgcttgtagtcccagctgctcaggatgctgaggcaggagaatcacttgaacctaggaggcataggttgcagtgaactgagatcgcgccactgcactccagcctgggtgacagagtgagactctgtgatacagtttccatctggctctcagtcttaggacctgtggaactagccaccctgttgtgaggcagccagaccacatggagaggccatgtgtaggtgttctggctgatagccccagccatcagtcagtattaaccactagacaagcaagtggacaagccttcagatgatgccagctccagcctttgagctgccccagctgtcatccagtggattagaaacaagttttctctactaggcaaggtaatgttgttttaagccactaaattttggggtggtttctgtacttaagtcactgcttccaataaatccctagtcaggttaactgtaacgggttaacctgttggaaggaaggaaatggaagaggcaaaggaaaaccctttccttccacgcttccttatttccttagccagactgtgagtttagcaccttctgctactaactgttggagattaagtgtgcttttgaagtgcaaaaaacaccatcatggggactcagtctatcccaacacctttccttgagggcttagagactgagcaggggaaagacaaagtttgatttcttccatttctccttttcttcttccttaggtatctctagtttcaaaaaaagggagaagcaagatttcatcctctcctatcttcactgtccttctaaattcaaatctccagaaagacaattatggtttctttttcactgaaagagaacacagctttttcagtcatataaagggaacaaagcagcaacatgtttctattatcaaggaagcaggattttattcatcagttatatgctacggacactgctctgtctttagtcactcatcacggttcttcaaagattccttctgctccccttcttcccctgaatatgggtgttcccagggttccctcctcagaccacttcttacagggcaccctttgtggtccatctaagcccctcccactgctttagctatcacctacattttaatgactccagagagccaaactacttcaacaccccctgctcccccagtagttctctgatacttcagattctacagggacaaaacagagttccttcccctagacttgaggcctacttctccttttagtccacaccctaaaccagaaatctgggtatctcttgctcttgccctttacagccaaccagttttcccattccaccaacagaattccaccaatttaattacttccttgaattcctcttttctctatccccactatccctaggtacacagcggtggtcctaattgattgttacttaggtcacaggctgttttacattccatcttcaagtctccaggacttcaaccagtgtacacctcaatatgacatttccaaaactcctttcatggctctccctttcctatgttttagtcctgaggcagaataggaatttactcataaagcaagtaacccccctaaaattgtatgcaaaattttagtataggtatgtaagcgcatttttttttcctagagaaagagcccattgctttttattttcctcaaaaggtatgtgtttcccccaaaacttgtaggtctcaggctaaagtccaaattcttcagcatgcagggtatatacaaagccctgcccgacctggcctcttgcctccctgcagctaacctggcaattgctctctcttaacatctacctcctggatttacaaactggggtggaggtgggaaaaaagaatcaaaatcataaagtgaagccaaaactgtttgtgtagcatttatacactgttgaagaatcaaaggcctttttttcatagtgcttttcgggagggagaaattggattgtaaacatgtaatttacaatctccacattttttattctagataaatgccacacacaccttcctgttacagaatattgcatagcaactttcaacatcattcagttttttaatacctatccacatatgatgttatgtattttacaaatcctgcaactaacaacgcagttcttgatagactgcgatctactgggaggactgctcggttttcacctgaattattgctcgtggttcacacactaacacccaaaaagacactctacgggtcatgacgtgtccctaaaatcctccatctactccagaaaacgttctaactttttgagacgaactgttgtaactagtctcctggcgaggcctgctatgtcttataccacaggctctaactgccaaatctttttcagaagtctttcagttgttgcctccaaacggagctctttgcagtcctcgggcggacgaatggacggattcgagcgaagcttatttcccttctcctaacgcatctacctataaatagcgctcaccgcgctgagtcaccaaaaccccgagtttccccaaatagcgcgtaacgactgctgggatcgcgtccctcggggctctgtgacagactccaaccacacacccgctgggctggactgcgggcccacacggcccagcgggtctctcaccacccggcgccccagggacgcgggcgaggccgcggtgtccggaccgagtcgacagcgtcggacttcccgcgcgcggacggcgctctggggaaggaggagccggcgggcggctggacctggccttgactgcgcggggtccgcccccgccccctcgggagcgcagagttgcggggggccggcaccagcctccgccctgcgccgcccgctcacacaatgggacgcgtcgggagggggcggccgcggctcccattccggtcccagggcggggactccgggcggcgggagaagcagtcgggctggggccagaaggaaaacccctctctccctctgcccactcaaactgcgaaagggctccagccggcggtgccaggggctggggagcagctggggagggagcggaagtgccaccccctgcagtcaagggtggtgacgtcacccctgcagccagcctgtagcgggggtgtctgtacatcacatgacccggcccccctctccccgccgaagcccgcgcgcgcgctctctcccccagccccgactcccacctctcccccgccccctctccccaactttcgccctccccgctccggcaccgctgtcaacagcgccagctccgccccctccccgcgccctgtggaaccgccacggcggcgcggcgggcgctcgcgctcaggtccgaggctccgagaagcgagcgtgccccggttccaccctgccccccagctcagtgcttgctggctgcgtgggcaccagagccagggggcacggcggcgtgcagcgacagcgcttctctgctccatcctcccacagcagttagaggacgaagctgaggcgccgggtccgagctcggagggagcgaggcgcatgcagcggcctccgggccctgacgcgtagcctccgggggtcggcccacgggcgagagaagcagccgggagcccctcctcgaccccagcaaggcggcccgcgcctccgctctccctaccgcccgggtggcgcacgccagtcctccgtctttggctgcggcgcaggcaccggccatacgacgaggggccaggcggggaccgcctccttgagccccctcggccacccctgccgtgtggactgctggggttgcagatttgctggctgttgctgcagcgcctcgttctatttttcctctcagttcccttctaaaagtggaggctcgggggaggaaaaagaaagcccacagtgttgaaaggggcggtacggactgacctgtcaacggcggaggaggaagacccccgttcggggcgagctctcgagcccgcgcagggatcggagctctgggctcgcgcggaaaggcacggcggcagctgtgcctcagccaggtgtcccccctcggcggggcccgcgccgccgcgcccgccccctcccccggcgcagcgctccccgccccatcgccggggaccagggaaccccccggctcgattttttgtgcagtttcagcaaagctccgaggaagttggtccttttgttccactatttatagattgcgtcaacattgcgaaaaggagaaggcggagcggtggcccctccccctcccctccccccgccggctcctgggagagaaaagccccagcacacgacctaagtacacagcgcgccagccgcccgcccgcggccttctgctccccgcttcttccccctcccagccggggcccgaacgctgccaaccccgtcacgtgcccgcccgggaaaaccagctccccggggctccgcgccgcccgccaggcttcgtggcggcggcggcggcagcggcctcacccagctcgtgggctcgggccgcggctcaggcgtcacgcatagcgtgggcacccacgccctcgccacccgacgaggatctcgggctccgcgacctgtgggagtgctgcggggcgtcccgcacttccgccctctctcgtctccggctccccagtcgccgccccgctcgccgagtgtgcgcgcattcgggcctcgcctcggagccgggaggctgtcctgtccccaggcccctcgcgcggccgctcttccaggcattgcggtgctagccccctctcccgcgcacgactggggagggcagaggtgtgagggatgcgggggtggctcgcagccgttcgcgggcaggcgggcggagcgcgggaagcgcggtgcgggcgttccatggcgcacccagacgctctccctcctccgcaggtgcagcggggcgttgcgcgagctcgagtcccccttcccggacagctagggagaagggagtttgcagaccggagctacagttggaagaatatagtttttgagaagttactggaagttagatgtgagacaaaaacagacgaactttccttcaaagccttatgacgaaatgataggccttgccatacccttgaaatgaaactgagctccctaccggcctaaagccgctgttcctgagcttcatgtaaacaaggagggcggtaaacaccagaggaaggccttacaacaataccaagtgcaagtagctcatttgagtgttatttatcttagcagcttccctgagtgatttatgtatattgcagtttaactttacagggtgggaataaaataatttggcttctcagctcactggcggaagaaactagagctgagctgggacgagggcaagaagcgcgtcgcacctttcctggcagctgaacagtgtgatgaacagtctggaagggttatgttattacttaaggggtttggggaaaccgttcccgcgcacagaccctcattcgggccaactgcaggccgtgggggactcttcaaggactcgcgcaacccgagccgagcttcctggctgggcactgggctcagccagtgctgagagcgctttcgctgggccagtcaagacagcaataagtttgcctctatttgggaaacctttccaggcttgcctgccctcttttaagagggagactaggtggtgggatcgtcagctgccaatgtgtgcactcgttctaaagaaggcgagaggaagtaaagcgaacctgtgcagtgtttgctgggcttccaaaacgcggagcttagtcgaccccccagcgaaccggacggcgctttggtcccctcacacctaacggtactcagagcctggtgcgggagctggcgcgctcgctcctggtttccttccaatttaggcaaaggccctggccgcccgtcttcctgcttctgctgtgccctgccacagcactcctaagacggcgaattcgtttctgcgccaattttgttttgaatatctacaaaccacttttccttgcatgaagaaaacaaggcagggccccctggcccgtcccacacctgcgagaggcagagatacagaggcctcgggcctcagccttcatttccccgccctagcttcgcgccaagctgcagtgtccccgacacactgtcaggacacgcgcttttcgcccctactttgttcttgcgcagtcttcccagctgcggagaggagggagcgaaagcaaaacgaaagcacccggggcgcatcagttgcaatagcttccctgagcgcggccgtgggaggccaagatctgaggtcgcgaggcgacggtgggggcccgagctgcgcagaaactgggtgggggcggtccctggagggcgcccgggagctgctagaagttgtccggagcccctcaacccccttggaaaagcgaacgcggatgttaatataccaactccgcagggaacttttggcccgggtcttgagctgaaattccagactgaatgggaccgtgctgaaagttcgacgaggcaaaggagtatggcgcgggggcaagctttgacccccggcttcgtatcctcgggagaggccgggactccggctcgcccagcgagggtgcgcagaggcctcctgggattctaggcccacagaatttttgctccagtgaagttggataagcactccgcctccccgcaaaaaccagagttctcggcttataaacacttcaataaactctggtgacattctccgcgctcgctccttgccctcgcggcagtcactgcagggacaaaggcggcctgcgcagacttggaagaggcgcggcccgcgtgggcggctttaccggccaaagacgttttcagttaaggggaggcatcttcagagctgagggtaactccccacagccaccccgcaggtagggcagccaaccccaatctggtcagcttaaaagtgtcctcggtttcgccccctttcccagcgaaccaacactggcagattggcctgcgagccgctcgctctgttgctctagcacatttatgtagccaaacggtcgaagagccccatctttaagcccaataaacacttaactttattctatttaataacacattttgttgtggcaatatttgtggattttggcaggtattaaaatctggtgatcctaaatgagtccaatgtggaaatgcagtattctctatgagtaaatagttctgtgcttcctctcactggcacctgacgcaaggcgcagccaaggactattacacctctggctgctcggacgcatcttcgcactgcgccccctcgctctttaaacctgggagacttgtaattgtgtacctgtttgcattgtttagcctatgcatcgcagattattcattttactaacaggactcaaaaacagctgtaattttcaaagatgcacgatggagttcgcttaggcgaacctcgggaaggcagtcttggtttcctgctaatgttttgccggtaacaggcagtagtcaatcccagactagctttgttggtttttattcctcccctctttaccacaacggcaaataccagaaagtcccaactgtaaaaagggcggcccactccgcccaaatttctctatacgatgctgagaggcgagctacaggtgaaatagactcctaggcacttctcttagaaaaagccttctatttcctctttgaaaatacttagcaaaagctgtttttgacttaacagactataaaaatgcctactttcaccatgctcgccctttggtttcatacgaagccacttttctcactttcttgcaagttctttttttcctttgtaatatatttttgtgaaacaggttcgattgggttatcttgctaaactgtccgtctaaaattatgaagttgatgttttctactctcctttgtttaaacaaaaaggacgcacacggatgtgaaagcccgtggttgcctttattctgcacgccacctttttttttttttctctgcgttcacaaatgatgctttgcctgggctaggttcagacttcagtacctaaaacgttatgcgtctgggcagtccccaagagctatcgaaaggccagccttgctcaccccattggaaccagcatcagaaacctcgatttagagtccaatttggaaacagatccgtgcctttctcggtgaaatgggaagttgcctaaacgatgcatctggctttagattttatggggaatatgatctggaaaagggaacgcctgtttcagctggggcaacacgccccgcgcgggtcccctggggcttctcctgcaaacaacgcgcgggatctcgacccgcagggcctcagtcgacctctgcgcgccaggcttggggttgaccccacaccagcgcgctcccttcctggcctcgcctggggtctctggcagtggctgacgaggctttttgaccaaaggagaaagtttgaggctgcagatcacatgtccttaaaggatctggggagagggagaggctctttgcaattggtgccaagaaactcgaacatcccgcgctcgccgcgaggcgaaaagaactatcctgggggagcacaagtgttcccgagactttgccaaagtttccagagtccggaggtagcttgcctcccacccccgcccaccactgggttatttcctaatcccctctaggctgcctcgggcgaggacccaggcggggcccggggtggcggagcagggagagtggtggggaagatggaccttccttgtggccggctccttcggcagtggaaacctctaaggggttaaaatggcgcggctggatgggcgtggggaatgttgccagtgttcggtcccgactcaggggagaaacggggtgggggtgtggggatcccggaaagggccggaaaagccgggagcaccgggaggtgtgaggccagagtttctgctactgggggctcttccagggaagacgctggcgggaataggatggggctggcagctggggagcctcgcggtggctattgcacgtctcggcccccctggacagggttatgtcaggagagcgccctggcaccgagctctggccgctggataagatactccctcgccggctccctccgtgagcggggctgggcgggtgcggaggggcgggcggtgcgcctcgccgagcccggggcgctgaggtcggcaagtcgtcttcggaactggcggcggcgcttctccagtcgacgtggaaaaaaaaatcgtctcaaatagcacccctcggtctgcagccctttaacactggtaaagtagataacaaggaactctgctgaacgagggaaactcagtttagaacgtcccagagtttccaagtttgtcaagcgactgggaatcttggtcgccgcgtggagagctgcgcccatttccccttccagaagaaaactgaaggcgtattcctccaaaggaaggctgcagtcaggcgccacacagaacacaggcagtcctctccggccgatctcgggctcgcctctcccagggccgtagggagcatcttttctgagcagccccgggagggcagctccgggcgctctccgcgctgggccctgccgcggccggtgcgttacatcaggaaacgcttggtccggttttctgtctgctagtcaaaacaattggctgaatctcgaaataacttttttgatagtccggaaaagaaacatgacaaatagactcaccatcaggcttgcgtcagagaaccattttccccagactatagtgagattgtttttttcattagttgcaggaactgatttttttatgatttacctacctgctgcagttgctgaatgtattcttctcccctccttttccccacttcatctggttgtcaactcctttccctccccgcccccatcccccatcccttttaaagctccgggtactggagtccatcgtatccagtttgtgtgtgtgtgtgtgtgtgtgtgtgtgtgtgtgtgtatcccgctagtctagcccagcgtttattaatggtcaatataagccacagtgtttgcatagccctcacaaaatgggtcatgttttcggttcctttgatctgcagcgacggaaaagttttgctttgcatattctcttttttgcacatcgagtttagtgacggtgctctcctcacaagttacaagttccctcccctttcaaacagttatagggatctatttttacagggacccaaagagttaggagaaatccagcatgtgctaaggctcaccttcactttttttttttccacacaaggattaacattaacgatgtaatgagttaaaacagactttaataccactaagcatggatttccccattaaccttggcaattatgtcacttcaaagaaggaagtatcaataacgaaattcttttgaattaaataaaattatggaaattgtccatctgaggtctgggcgcagaagaaggaggtttcggtattttaaagaagaactcttattggtggataattattaatatgaaatgaaatttgtaaagctagccctatcagggtacctatatatataggtgcttgatgagtatttagtctccctcacaccattttctaattcccatccttgaaaattttggcaggaaatacagacttcccagtggctaaaaaattatgctgaaacttctcttgtggttcaggtaacctccacttacttaaaaacacacacacacacacacacacacacacacacacaaaatttatccagggaactttaatagcttattaaaccttaatggaactatctaggcaaaataaaaataatggtgattacgtattctaaatccaaaacacattaaattaactcgaattttttgatggttccaataggtaactattaccacctgatttcgtttacgagtttccacagtaaaaacgaaatttgtcagcactcgtttgcttctagcatttctgctacagcaggcttcgccggcagactgatctttctagaccttgtctctttcagagcgccaattttatattgaggctattcagttctccacttttaagagagacgggtgcacttttttttcctttaaaaatcaaatgagaaaatggagaaagagtttgtagcactcacgggtggagaaaacccatctgcctgatccttttgtcccggtgcggagtcgctggagaggagagtctcctggagccgcttcgcggatcccactgggtcacctggtcctggcttattttctttgaggcccattctcggggagtaaatagacagtagcgagtttcctggcaactttgcactactctttaaatagaagagaattcctccagtttgcctccccttataggctttcccgcctcaaattgttttaaatgctcctcacagtctttttgccccttctcccaatgacaaggcaagtctcagcgggtgaccttggtgtgtgccgcagggttcaggctcttggagcccagctgccctgctgagagagcgggaggatagtcgcacctaattagtacgcggctccggcggagatgagtgcgtgggcactgtgcgtgcatcttgcacatgacacccaagttcaaagcgccctgcttatgaaaacttggggcatcaatatcgtctcatcactcaggcgcccttagcgaatctggacagatcgaggggcgcagtcttggcttccggaccaggactttctttttttgagatctatttagctagtttagaaaaatacaccttatgcgaacatatacagctattttctcgccctccactccagtggtctgcaagcccctggtgctagtgtgaatattcctgagtcctgagcgggttcccgcccgtgcagagccaagaacactgagcggaggtcactgtaagttcagagccgtgcatcctggttagaattgggagaaaaaattctaagcccgcccggagctgctcagaaaagatgggtctcggtccagcgcccccttaaagtcctcagtgcgcgaaagtcttggattactgtgctttgcgcaaattggacgccacgcctgaagggcccgcggaatcaatcgcttgccttctgtggggtcctggcatcagcgtgaccaggacatgctattattattggaaaccgagtcttgaagtggacccccagcctccacccaagccctgcggccagggaataattctaagggctctcccctttggatgtctagggtcggggcggtctcggctccctggatcctctggtgtcccggcaccgaggggcgctcggcagcggggcagaggggacggcctcgcgaccccgccaggggcacgaaggaacggcggccgagggaagtccacgcgggctctggcgcagcagcgaagctggaggcgtttgctccgctctgcccggagcaaggggcgcgcaggggaaaccgcttctagagcttcgcggggaagggatcaggggcggagggaattctgtattctagttgtggatctttcgggtctctgtcagttaacagaagcctttggggtgtgggtccgggacgccgctcggagccgtaaaaccttgcctgacccggcgctcccagccactgcggtgcagccgccttcgccttctgggtgcgggacacaatctggcccaaggtcgttcaaatcggggccggcctacccctcagagagagcctccgcccatggtccagtggcagggaagcctcaggctacggcctagatggagcattcacaagggcgtttccaggccccagtggcctctgagcaggggttaactgaggttcaggtttcttctgaaaacctgaactgaggttcaggttcacaaaaagaattacacaagtttcccaactctacaatctgttaactcaaggccgattaccttctcagaatcctctaagtatttttgcctgtaaagtgaatttggactttcttcttctcttcctcacacagctggtcacagacaaaaggtgggttacaggcctggaaaagattcatcccctgctcacacatgtgcctctttcttgggacgttgtgtgttctccacactcctgggccggtcaggaggggtcttgtgctctgctagggaggtgggcttccctgtaggaagagtgtggagggaaaggcctagctggcccacttggtagggagggtcccacgtggcctgcagaaaggcatgaaaatgaccaggagacaggacctgggccgatatgtgtgaagggtggggatctggaggcattgggaaaactctctcccagtgaaaaagaggcccaagaagttctgctgcctgttctaagaagacaggatgctcagtctcaaggtgggacaaggccagagttccttgcgaccaaactgggatcggaaatctgtattttcctggctaaacttcttgtattttaagcttctttctcatttgctttccgtttactctttagtcaagtgtttctgaaaatcttgccaaaaggaagtcattcagttaacagatatttattgagagaccactgcatgtcaggcacaggaataggacggtgaagaagacagttcttgtccttacagcttacaatccaatttttatcttaagagaataaaagcaattaaaggatgccatgaaaaagatacctgggtagatccaaggtgaagggagcatggctatttggggctacttacaagaacttcagtatccttgaaacttagagggcagaggacctgctgggggagcagagagacagcttgaggagaggagcctgggccctgagagggggacccggggtgaatagttcatcatggggctttcatggtgcacagcaggtgaagccgagggctgtgttagatccgatgccccctaggtttccttctggtgtgaagatttgaaggattcacttttatcaagggagctgatgtttccttgccaggcaccacatatatccctgtgctattacacatgattaatactgcagactttaaaataacaatatgcaactaaaaagtactttcaagagaactcatctagcagaacgttttgtaagaatattgtagttagagaattgtgttggagattaaatcatacatagtgaacaagacactgtccagtcctcacaatttaccatccagtggaagatacagagaaatatatatgagacattcgaattcactggagaatagagagcaggctttatgctctcaggaagttgggttatagggttggggcatttagttcaaggtagcttggggaggtcccatgaagaaatctgggagatgattcatagaagaacggcttttgtgtattgactgagcccttattcttatatggcattcaaaatcctcctgcaaacacagtatttctggggctcagaattgccctgaattaataactgtgctagaaagacaaaagaaagttcttgcaactgatgagacttaaaaaagtcccctctggaaatgttaaggccttcacaatatttctagggctcaggattgtcaaaggctactaactctgccagagagacaaaagaaagatcttgcaactaactagactaaaaaaagtgctagtttgatgttacagtgattaattatgaaaatactcaggcatgatgcttttaattgaatccttttgtagcattattggtaggggcaggagggaacagcaattccttgaatgcctgctgttccataggcccttgacatatattgtctcttttaatgctcatgacaactccatcaagtcggtatttttatttccattttttagattagaaaaatgaggttcagtgaggttatgcaaggccacttggggagtaagtggcagacccatctgacttcaagcctgtgttctcttcccttttctcatggagtgccttcccaacccagagggtgatgagtctaaaaaggaatcatattaagagaattcacatttgcaaattttaaattcctataaaaaaataggcttggatgaacttataatatctctataaattatattttagggttgccaatataaaaaattaaggagatcaaaataaacatcaagaatgctttatacaaattaaattaacagaatgcaattaatgtctctttaccgttgcttgctagaaaattttcagaataaagagatgcttatccattagttttgctttattacacagagaaacacatgcgtgtctagccttacacttaagtggaaattcccttaggtcactttccctgggttgtgactaaaggcagctgtcattatcatgtaggccatgtgaggtttgtgactggagaagggattatggtcatgttataatgttataagttgataaaattttataggtacaagtaaaagctttttacttaaaacgaaaatcctaggattacatcaatcaatcaattcagcaaatatctgttgaacatcttctgcctgccaaggaccgtgctgtgtgctgaggatataacgttgatcaagacaaactgagtccttgctactggagacagccgatcaggaaggaaggaaaacaagacttgcttggcttctgccgtgtgccaaacactctcctagattcatttaatccttcagatgagcctgctgtctgtccctgtatatgcagaacatgcgcagaaaaaaagtgagcctcagaaaaattaaatagcttgttcaaggtcatacagcttgtaaatgacagagctccaattcaaacccagcaataaagacaaagttcttttcactatgctacactacatccttgactatgaaaatactaaaaattgtgagtacttgttagtcattttatccctccttggcttgtttcctcaattaaaacagctgggtgactattcttatactattcacctcatagaacactcttaaaacccaaagcactgtaaaaaagtttttttacagtgctttttaattgtttagcttaatttaattttataggagaaaaagcatatgaaccctaataacaggtgtgtcataataatctattggtagaaaaaaaatcctagttcgataggattagattttgacaaattattattgttgcttttcttttattaatttaacaccaaacatttattggaaatagtagaattatgccaagcctatagatacagagatttctgagcctgtagatacagagatacaggataagggcaaattccttatccaacaaggacctccaagtctagtgggtgagagacatacctatttaggtaaattataaaaatgtgctgtaacagatgcccaaggtctctgttgcacagactggagtgcggtggtgctatcatggctcactgcagcctcaacctcctgggctcaatcgatcgtcccatctcagcctctcaagtagctgggaccacaggtatgcgctaccatgccaggctaatattttgattttctgtagagacggggtctccctgtgttgcccaggctagtctcaaactcctaggctcaagcagcctcccagagtgctgggattataggtgtgagctactgtgcctggccccaactcttcattttaaagttttccaatagttcttgtaaagtctgcttacacaggcattggggaaagagagctagaccacttgattaaagtgaggtggcctagagaaaaacagctttacagcctctgacaatgttgacaaggatgtggttatattctactagcatagattaaggattcaaacagatttagataattcagtgtgccatggatgggaaaggttgatgggaagtcttcaaagtagatataggcaacataaattataaaacattatatggcggggggcattttggctaatagttttacccctgagttcatttaaaactgtcagtggatgccactcatttctagggcatctagtcgatccaataagagtacagcaaagacaggagttcaagaccagcctggacaacatggcaaaaccacaaaaatacaacaaatacaacaaaaaatacaacaattagctgggtgcagtagcacgtggctatagtctcagctattctggggctgagatgggaggatcacttgagcctgagaggtcaaggcttcagtgagctgagatagcaccactgccctccagcctgggcaacagagtgagaccctgtctcaaaaaaacaaaaagtacagtaaaaagttctgaacatattttttctaagcaaaggaatgttttattcaaatgaaactttaacaaaaatctagtatataaagaactgcagtagctgaagaagatggatgaggaggagggacgccctgacaaccaccagaacagccatgcattcagtagactgaggggcctggcatcaagtcttgccttctgtgtattccaggtctggaaataggcagccacatctgaggtgcacagtaagtatatgatgactgactgaataaatgaatgaaatgccatcattttgcctctaaatgtaattgaggaacacaaagccgctaacattttcattagtgaaaaccaaggtaatgaatccatttaatagctcattttcatcaccagattcttctggccactcacggtccttacttgccttctttgaacatgagcttatgaagcatttggtttttacagtccaatttcctctaggactgtttccatttgacataatcaggaaaagtacccacctgagttcaggaaacttggtgaaattcaggctgcattttagggggtgagtggtgggataggaccaagagggaaaaagaaaacaattttcttgtaaggatcacacacggctaattttaaaaataaaattattcatctaattatataaataatgtattgtcattgtagaaagtttggaaaatacaggaaaacctaacgaaggaaataaaatttactttccctgccatcacccagagataatgctgtcattgatgtctatccctccgttcatgtctttatgaagcaggataacatatataacatccaaatatgttttaacttgcttttatgactacataatatatgcaaatattttatgttgttaaatattgttctagaacatgatttttaaatttctgtatcatcaccgatggaagaatgtaccacattttgtctaacaaatttcttttatttattatttatttatttattttttaaattttttattttattttattttattattattacactttaagttttacggcacatgttcttattgttgaaagtttgacttatttcccctcttttttctattatgaatagtgctacattgagtatcctgtagtctgagtgtgtgtctgtttagtatttatggcatgctacttatttttttatttttatttttaattgttgtgggtacatacacagtaggcgtatctatttatggggtacaatggcatgctacttttttttttttagacagggtctcactctgttgcccagtctggggtgcagtggagtgtgatcacagctcactgcagcctcaacctcctgggctcaggtgatcttctcacctcagtctccagagtagctgagaccacaggcatgcgccaccacacactgctatttttgcattttttgtagagatgggggtctcaccatgttgcccaggctggtctcaaactcctgggctcaagtgatctgcccgccttagcctcccaaagtgctggattacaggtgtgagccattgtgcctggacggcatgctactttttaaggcttttgatgcacatgggcaaattctagaatggctgtactgaagtagacattgtggacaatgcatttgggttcttgtttcacacaccagagcttcacttttcatctgcaacggcattctgaccatttttaatgagcattagttatttgacactgagcataccactttcctaactttgagaagaaagagaggtattaaagtcttgggtgtggctgtttttcagaatttacaattaaaaatctatctcaatattttgctgtctttaaaaagcagtgaagtctgaggaaggatattagtggattcagtggctgctgttcataatgcctgcaggacattttgagtgtttccttcctgagttcagagcctcatcctcgcatctcaatgagacattaccctagaacctctaccaccatgactaccagcacttctgaattgaaactgtctttggctgtcaatttgctttggggaccttttctagaagttaaattcatttttgtggaggctaaaactagtcactcgatcacatttgtgatatgagtcatgttagaataaagatctagaagagtggtagatcctatctaacttgcacaatagtagaaagtgaggtacaaacaatatttctcctagtccctctgagttcaatctggatttgagatttacttttcatgatctgacacaaagtatgtgtgtgtatgtgtattttgaaaaatttggacaggagtcccatatgatgttgaattaatcaaatataaatacacacacacacacacacacacagacacacacaaacacagagacacacactttattccattagggaaagtatgctttcttttttttctttgctcacaaaactgagaaattggcagaatattttacttgtaacttggcagtattgcaatttacagacgagaaaggcaagccaaattgggtgaaaattgtttgagattttttttcccagttttagacagtgaaaatcatgtagctgagcgtgcacattcagccgttttctgcttgatttttaaccgcgtttgttcattggcactgccagagctagttacaacttcccggtgcaagcatgtgatggccaggggaaggtgtggggattcgtggctgtcctccccatgctgttaatgttaaaataactgttgtttgaattgttttgagatactgattagagaaatatgaaatgtgatattatttgagcttcataaatccatcttaattatcaatatataaacacagacttaggagtgggagatccagatcagacatgtttacaggcctgagctttttccgtgagtttctggaacattgtggtgcctgagacacagcgggaatccgacgactctgagaacggactttcccttttaaatgctggaggctttgaaatcgtcttcacaatgagggaggattcatgaagtaatgaaaagctgtttcctctttaaaacgttcagacagcagcacaaacatctgggaatttgtttgaatatttgggttccctgaattacccatttccttaacatacattttacttacttttccaagggagatacatttccacctcatgtttttcccagtttagctgtgttaggctcttcactttagcatttaggttgctttgtatttaaggacacaggttaaggccgtattatgaaaggtatgatttgggtttgggggagcaggatgttgttatgcgtgaggggcaaagtgatttttgtgtgtgatacaagtttcaattacatcatggtgtcatccttataaattaaatttaaaaacagttgtgccaaaaaaatagccactaatgtttcttttaaaaaatgattaagcaacaatatttactcaatatttgaattaagcaaaactgtcatcttctttctccttttcagaacataattcctctttcaacttcagaagtcatgagacttccctttctttctccattctcttcctcacactgcagtgtctcaaagggtgaaaatgtctgtgtgtgggagagggtggtggtggtagggcagtggtcagaacattctggaatccaggataagaaaaaccagcttgatttctgcacttaggacattgttgatgtttatttagggatgtgctatctggattgatggaaaaatttggaaatacttaaatatttcggtatgtaatatcggatgatgagacagtgcagcactgatagcttcctggttgtcagtgtggctctgtatctctgttttacttgtcatatttgtactaagacaggtgtggttttaaacggtcagtattgaactatttttgactaattagatgcgttacgtgtgacttgccagtttataattagttaacatatgataaaaaatatgagatatattgattggtataactatactaaatataatttaatctagttgacttttttaataggcattttaggataccacaattactgctgtgaacttcaatgggttatgaatgacaattgttactctggagcatcaggcatgtagaaagtatagggattgggcttaatacaaatttagtggcataacctggcagtcgcctatttgattataattctgctgttattctgaatgctgttcatctgcccttatctcatacaagtaggttgcagaacatatttttaaaaatctggccgggcacagtggctcatgtctgtaatcctagcaccaattccgaggttggaggttggcccgaggtcaggagttcaagaccagcctgggcaacatagttagaccctatctctacaaaaacttaaaaaaaaatgaggttgggtgtggtggctcacgcctgtaactccagcactttgggaggttgaggcgggcggatcacaaggtcaggagatcaagagcatcttggctaacatggtgaaacccagtctctactaaaaatacaaaaaattagccgggtgtggtggtgggcgcccataattctagctgctggggaggctgaggcaggagaatggcgtgaacccaggaggcggagcttgcagtgagccgagattgcctcactgcactccagcctgggcgacagagtaagactccatctcaaaaacaaaacaaaacaaaacaaaacaaaacaaaacaaaacaaaacaacaaaaaagagctgggcgtggtggtgcacacctgtaggcccagctactcaggaggctgagatgggaggatcactagagcccaagagttggaggctgcaatgagctatgattgtgccactgtactccagcctggatgacagagtgagaccctgtctctctaaaataaataaataaataaataaaaatctggctatatgagctggcaagtttgtttatttactttaaaagttaaacagcagttaattgtgatttgtggatcacttcttccccattgatttaatctctgcttgcttaaataaattaaggtactgtatattctggattatacttcctccgcctcaaatttaggaatattgtgaagtgagactatgatacttgactgtggaaagggatatatttgtaccccattaccaagttttcttcttggtgtctttctctagttcagatggaactatcatttatatctaggtctgatgaaataaaactgagggagaggggcttccaggtccccatttcttaaaacgtcatgttgcctgacatgaatgaatgcatagccacactcttgttctctgaatctgtcagtcaattatgtgcatagttcgcaactaggacgggatgtcctgtgaagaaaagataggcattaagcccctgtaagtatgaggattgcttgcgacatgtcccaagcaattgtagttcatcgctgagatcaagaatgacatgtttggctgggctcggtggctcacacctgtaatcccagcactttggaagggtgaggagggcagatcacctgaggtctggagttcaagaccagtctggccaacatggtgaaaccccatctctactaaaaatacaaaaattagccacacgtggtggctcactcctgtaatcccagctactcaggaggctgaggcaggagaatcatttgaacccgggaggcaaaggttgcagtgaaccgagattgcgccattgcactccagcctgggtgacagagtgactccgtctcaaaaaaaaaaaaagaaaacatgtttggctttgtggtacaaagcaaagttttcattagcaaaggtgaaagtgcccaatatcctgttatatcaaactcgattgattaatgagagggatgaaggttatggatgtttttgtttgttttggagggtgtgtatgtgtgtaggggatgtttaatgtgagtcaggcagtgtgagaatagtttctggggtctggtcccattgagaacaacctgattctggtaatctttgaatatcatttaacacattacgtggctcttaataaatgggtctgcttcatagttacaatagaaattgacccctctgccatgtggtcccctccttccctccatttggccttttatccttggatttgggtcacaacctttggggaagggtggaaacaaagcagaactggcaattatcccagtgatctggattctaattaattaaggcctactttttttctccttttttggagaattgtgcctgtaggcattttgtgggaaggatgcctttcttattgaataactatacctcaagcttttttttttttttttttttggacccaggaagggatataaaaaataattagttatgaggggcaccactgaaagtagaagatttacactcaagccaggaatttatttgcatatcaaataaaggacagagtcatgcatgatgtctcagaatctctagttatcctaatcagtaaagaaaatgaaaccagatgtgttcatttcagctttgaattgtgttactattagaataaaaattaagttcccttaagtatccttttaggtcaaatctaatcatttctctagatataattctcagaaaagccagtggcattttgatagtggaacctggtattttgctggacttaacagttctctgtgaagctacatacaaattttatccattgaccattatgctgtacatttcttaaagtgctatttttgttgtggtttcagtgattctcatccgaaacatagctgcatcatgtcatggaaaaacactggactgggagttagaatcattctcctctcagctcttccattaaatgaaaagatttgtgcttttggaaaatcactttaactctttggacttcagttttgttggcctgctacataaggtctctaccatcattgaacagtttaggtctttattagaacatgcacaacatagtgagctaaattgcaaactcatctgtaaaaatttgacatcttaagcttcagagtaaccctgcttagtatttaaaagcaaatgtcaatgtcagaaggttgaagtcctaacagtattagaaaagcaaatgccatcaacttattgaacctacagtttttaaaaatttgtgtcttaataatatttaatgtttttatccgttatactggtaatccatgttcactgagaaagtttataaaactcaaaaaaaatcgatcttaatctcaccactcagaactaactagcaatattttgatgtttccattccttttggttctctgtatttctcttatattctatgccatgtatgatttatttttacaaagttggaatcatagtttttctatcatttgtttgtttgttttttgtttgttttctttttgtttttttttagagggagtctcactgcaatgcccaggctggagtgcaatgatgtgatctcggctcactgcaacctctgcttcccaagttcaaacgattctcctgcctcagcctcctgagtagctgggattacaggagcgtggcaccatggctggctaatttttgtatttttagtagagatggggtttcaccatattggctaggctggtctgaaactcctgacctcaagtgatttgtctgcttcagcctcccaaagtgctcagattacaggcgtgagccaccgcgcccggctgtttctgtttttttcacttggggaaacattgtgagttgcttcccatgtctttattccaaaagatggtttttaaaggcttttaatttttgtttttgaattacatatacttatatataattataattatatatatgtagttttattttatgaagcagaaaattaaactttctctctccctgcattctgccaacccactctctctttctcagtcacattccctgtagggaagtccatttatagtttgaggtatattcttaaggtccgtaatagatgtaagtatatacatgtaatagatgtaagtatatacgtgtaataggtgtaagttcataaatgtaatagatgtaagtatttaaatatgtatgtatggccatatgtgagagttttttacttaaatcaggccattccattcacactactctgcactctgtgatctttcatgctgcattactgggagtgaggaggtattttctagttaatatctactgccctagctagttcacagtaatggctccacagtgattcccactatggatgtctgtttttttttttttttttcttgatggagtctagctctattgcccaggctggagtgcagtggtgtgatcttggctcgctgcaacctctgcctcatgggttcaagcgattctcctgcctcagcctcctgagcagctgggattacaggtgcatgccaccatgcccggctaatttttttgtattttttagtagagatggggtttcaccacattggccaggcttgtcttgaactcctgacctcatgaaccacctgcttcagcctcccaaagtgttgggattacagacatgagccaccgcacccgaccggatgtctgtttttatttaatcaatcacctattgctggacattgtggttggttgaagttattttattttgttttaaaaagggttgcataatatcttgtatccaaatctttgggtgcatctttgattatttccctaggatgaagtcctgagtccactgggacgtacgtgtggcttttgatattgccagtttccctacagaaaggtcatcctgttttacattcctgtaaaatgtgtatgagaggcccttctctgaccttttcccactctgaactagtcaaaacttaaggcacatttttcatcattattgtaccagtttttatctcaatttgagtccaggacattcctttcagagtatggggaaaaaggtcatccagattctctggtgccttgatcatctttgacttttctaatgagactttgtaaagaatcctgggaagttataagttccactatacggtatttctatttttatttgtcatgatgaactcatagattaataatttattccttttcttaaatttagaaactagctgacttagatttcctctcttattaaaatataaagtcctttgggaatggtaacatattatcgaacgttgtgatttgtattccaggaactagagtctgttttgattgagcgtctaaaaatccttgttagggagggaggagaaaagtgcccaagatcagtgggtagggcccctggtcctagggaaagagtcattgttgatttaccaccattagtaataagccattcattaaatccatgaagacaaatcatgtgttacattttagttgtaagtttcttgatctttagattttgtgactctgaagatacacttcagttattgctatgctttttttttaaggaaagaaagttcacaaataggcaatgttttgatatatggccaataccattttaatatagcactccactgtgggggttcagtttatgacaatggaatacagccataactagtcacaaaggaaccgagatcatgatataatggggaacaggtacaaccctaatgcaggatgcttgcattagattcttggccctgtgcaattagtatcctgaattactctaggcaggtaacttaggtcatgacaatacatgctttatatacttctaataaatagcactgtaaccaagcagttcaaagtgggctcctaacactccatgacatcttcattagatcagatgatcacaatacaactggataaaaagatcaccttgtcactgcattcagtttgtgctgtacagataggccttttattcctctgtcttaatttttccatctacagaaaaatattggtgccaatataacatgagattcagaaactgactttttgtcttcatttactcagcaaatgcttatttgaacatggctatgtcgactatgtgccaggtcctgtgctatccacttcagtttacagtggtgggagtcagaggagtcaggccagaagacacataaaaggagcccactctacatctggcacccctggattctacattgcaatgtaaatgtccctgtcaagaccttcactacctcctgctctgcagcaggaggtaagagcccatctgtgcaatttgctgtccgactttctttcagtacctggaggttggaaggggggaaaaaagcaaactttgggtatcaaaaatatccctctccttatcaatcttgatttctgaatttcattatggtgttaataccattcgtcatttattatacagatggcaacaatttgtttttgataagcaactcagtgcctttcaatcagtggctaagaccaactcgttgaacacaatgggatggttaattaaagacacattttaaatacacacacaactcacagatgtatgcagggacatgcatacaactgttaaggcagcctgctttggtcctgaagaatataatttgatttacagttgagaaatacaaactaaactctgtttggggaaaaattatgccctaaaaaaatgactggggtagaaatactgtatttgagaaatgagaactttaaaacactccactttgtctttgttaaaatgggcgtaatagaagtagaattttgccaagatgtttaaccttattgaggccacaaagtaggaaaggtttcatttttaattttgcaaaacccaactttctttcttcctctttatttccttgttttcctcccatctccctccctccttccttcccaccttcctttcttctttccttctgtcttttcttctatctttccttccttttttctttctctgtactctcctgtcataatcaagagtaaaaagtttaactttatgcatctgaatacatttattcatggattcttatttaataaaaatagaaaaaaaaacactcgtaaagaaaactcttggtgagttacaaatggcacgcttcctttggggcgcaggaactcagggtgctcttaaacaccttgacattttcaggactttctgccacctgggatttagatcaaaactgcagtgcgtgtcagaccatctcagaacaaggaatgtttgtctcagacattattatgccctatctcttgatgaaagactgggatagagtcaaatcatgtgtcttggtgtttgtttaatatttgtgttccgcatttattagctgatgagttactggagatttgcattcttctgagtcagccagtatgacctattttattgcagtctaaagttgtactgaagggtgccttggaaaacatgttctccaaatgttggtcaagactgacattcacagaatttaaagctggatgtaatgttatccaatgacagcttcggaaatatgatgactctgcaagaaatcaggggaaattcagaatggctgttaagaccactcctaagactatcttgactatgtgaattctttctccagttttttctgtgtcatcccagcttgccatctctagctcctgcttcacaggcctcgaactacctctccagtccacttcagtgccttaacagctcagatttcacttccagtagtctagggcttttacataaattagagcaagaagagaatacagtggggagaacaaaactgattaaaaggttggaaaaataagacttatgaagaaaggttaaaggagctaggattattcagcttggaaaagagaaactagtgggtggcttaataaaagttttcaagtatatgaaaggttattatatggagactggcgaccagctgttctcctgccgctgagaagagaacaaaaggaaattatctttaacttctgcagcggggagctagcttggaaataaaggatttcccagtggtgaggtttgttaaacattagaatgcattaccatggcatctctttttctggagatctttggaaataagacagggactggtgtggaagggatggtttagataggtggaggcttgcctaagttactggagaatcaaccagatgacctgtggaagctctttgctggtcctttgagtctacaccaagccaactggacctcagccagaaaagatatggagaagagccaggctagttcatgcctttgactgtttcagcagaggcagagccagtgttcaccttgtcacaggcttagttttcttgatatctaattgttatttggtggtaagtagtgattggagcagggatgggaaggaggttaaaaaattcaaccagctaaaacatacataagatctccctcaaagaatatttcagtgagtaagggtgaggcctatgaaatatgaagtgcccttgtaatttttttttaagacttcaaacgtttttcctcaacactataccttctatgtgttcatgtaaactgctcctttaagcttttgagatatagaagtgtatgtgtgtctctaaaaaatggaagaagtgttccatttagttcttattaataaatggataaggattatgggattttggactcagatggaatgttggagagatcatttagtttaacacagtggatgagtttttctggacttctaggcttaataatcccaaaattatattgccatgacataaatatagtattatacttaccacaagaatttaagtataatataatcatgttaacaaaaacatctcagtgcatttattatttttgtcaaacaatatgttagtaaaatatttttcaaagaattgaactctgttttttaaatttagttcattatttagacataacctaaaagatgttgacaatacattcctttttttttttagattgaagcgttttttaaattgtggtaaaaaattccacaatattaaatttactatcttaacttttcttttttttttttaaattgaaacagggtctcactctgttgcccaggctagagtgtagtggtacgaacatggctcactgcagccttgacctcctggggtcaagtgatcctccttccaccacagcctcctgagtagctgggactgcaggcacatgcccccaggcctggcgaattttttaattttttgtacaaatggggtctctccatgttgccaaggctgatcttgaactcctggtctcaagcgatcctcctgccttggcctccaaaactgctgggattacaggcatgagccactgtgcctgcccattttaaccatttacaatgtatatttcactagtgttaagtatattcatattgttgtgcagcagatctctagacctttttcaatacgcaaaacagaaactatatccactaaacaccgattccctctctcctccctgccagcccttaggaactccctttctactttctgtttgtatgattttaactactttatatacttcatttgagtggaataatacaatatttgtcctttgagactggcttgctttgctttgcgtaatatctttgtggattatatggtagttctatttttaatctttttgagggaactccatacagtttttcataatgactgcaccattttacattcccaccaacagtgcacaaagattccaatttctccccatcctcactaatacttgttattttctgttcttttgatagtgaccatcttaatgagtgtgaagtgatatcttattgtggttttgatttgcatttctcttatgattagtgatgctgagtatcttttcctgtgcttgttggtcatttgtgtatcttttttggagaaatgtctattcaagtcttttgtacatttttaaatcaggtgttttttttgttgttgttgtaaaaacacaagtttcttagatattctggatattaaccccttatcagatatatgatttgtgaattctcccattccataggttatcttttcatcttttggttgttccctttgaatgcacagaagttataaataatttactaagctttaagtattgaaatttgaatcgaggttaaaaattttcttgattacttcaaacatattatttcaataaaaccacaaaaggtattgattcagtatgaatcactgattatgaacacacacacacacacacacacacacacacacaagcaaacataaaccttttattcctgaacagttataagaaaagattatactacttcagttgttatcctagagatttttctttcaactatttaagaagtttgagattagactgttttaaacttctgataccattctacaaaaatgtgattaaagaaaatgaaagtaacttttactgtgcagcgtcagaataatgaacatggtgtattctttctcttttaatcatttcatttaatgcttcattcacaaagattcttaaagaagcaaccacagtgaggacgtgctttggcaggcaaggagaggacttgcactctgtctcccactccactgtctaactttgaactattaatgtaaatcccagaaacctgaactgttaccatttccttgcccaataggggtaaccagacctattctcactaacttggtgaatgtccgaaaaatacataggtcagtctgatatttttgggacttcctaaattttctttgcttttgcaagacactcagatctatacagcctaatttgtttttacgaacactagcagagtacttcaggttggagtttttgcctaaagaatataacaaatggggagtaagttggagaaaccagagggagcctggtgcttctggcacaggtaacacagttaactgaagtcttttggcttcactaacaatggccacctgaagcttggccaaccctctgtatatgccctttctctaatcagaaaggtcatatgccacggaagatttttctcagtttttaaaaatcccctggctggttatcctgattccttaaaacagttttttgaaagtaacaaaagtagaatgtttgatgcattttatgagtccatggtaaagttagatacatgtgcatatgaacacgtgttcttaagactcctgtgtagtcaagagagctgagtgttcagaactcaaagttggcctaataaaagacaccagactatagtacttgctttgtttgttccgtttgactgaaccaaatgtcttcaagtttcgttttcaatttttatcgtaaaaaccgtgaaaagcaaggtgtttgcttactgctgggatttgattccatcttaaagacctggagcagaagtttatatggatttcagaaagcagctgttttatgtgcatacatagtacaaggtagaaaaatgtaatgtaacccagtaagattaaataacagcataacaaaaacttaaaaaattcaaagttgaatatgtagtacacctctcacagtggaagtcctggcttttaagaaattgctgcaagcatttaacatgagaaatctgtgaatgttcattcctagcagaaaaaagatcggatatgattgtaggtttctgtgttgttgctcatattgagccagctattcatgtattcagattcatgggagaatttctagcatgagttctgtctggtatatcactctgtgttatggtttctctatctacctttacaatgcacatcctgttgattctacttattatggcagaataaggaaatatatgtgcattacgatagtgctattgatatgcacttgatactctggctaagataaacataaatcaggtaaagccaagtgtattttagcctttaaactgggatatgcattccccacctgctcagactgaaaactgtcttgtaggattaagaggatggggagggtgcatggaaaattattttttaaaggaagaggaataatatgtagagttaggaacattatagactgttaaaggaccaatgtttcaatgcaaatgacctccaagttatataaaagccctgtgtatgatatgtttattgttattagtttttagcctttgcagtcttcggagactttgctggcctggatttcgagtttagtagagtacattcagctgcattgtgcatttcagctctatggaaccgttgtgcttcgtccctgtttacctcatcctgtgggcaagcatctgcttttgcgtcttacttcttagaactgcagctggatttctggaattctgtggctgtgtggtattttctcctgcatattaataagattaaattgaccaaaaggtttcttttttccttcaaaaattttcctaatatttttagagtatgaagattatatagctttattgtaaaaatattcaagcagtattgaaaaatataaagatcaataataacaacagtcccagagataaccactagtagtataacatattggtgatcatccttacagatgactctcataaagatcaatactaacaacaacaatcctagagataaccatgggtaatataacatattggtggtcatctttacagatgattctcaatgcatatatattcacatataaatatatataagtaaatatatacatactcttacaaaatgaaaaaatacaatacaaacttttgtaaccttttccatactaatcactatagatctacatcattattttaatggatgcattatatatattgtatatagaatactatctggcactcagtaggccctcaaccaatggttgaatgaatgagcaataatttatttaaccaatcttctattagtggacataatttattttctgtttttcactattataaatcacatggcaattaatatgtttttgcatcttctttgttcacatgtacaattatctgtttaaggaaaccttaaaagttgggtcaaaaggtggaaacatttaacaatttgatagtgataaacttgctgagttggctgagtttatgctcaagtcatacaaatttacattatcatcagcaatacacaaaggtgtttgtttccgcacattcccctgcatgcctacattgctgtcagtcttttagagtttgccatcctgatagaaaaattgctgtactggttttccttgcattatttacattacaagcaaggctgagcatctctttgtatatttattggccattaggtatttcttttatgcattgtctgttctttgtccagtggttttgtcttgaaacaccagagacctattttatcttaatgaagtcatttacttttataattctatcatatgcccccaaacagggaaagatgcatcttttaggtgggtatactgataagtgaacttgtgtggacccgtagttctcatttgtcagaggtagcaacgtagggaatttgaatatttttacctctaggtcggtgtctttttttttttgtttggagatgaagtctcactctgtcacccaggcaggagtgcagtggtacgatctcagctcactgcaacctccacctcccaggtccaagcgattctcctgcctcagcctcccgagtagctgggataacaggcatgcgccaccacacctggctaattttttttttttttttttttgtatttttagtagagacagaatttcaccatgttggcaaggctggtctcgaaatcctgacctcaggtaatctgcctgcctcaacctccctaattgctgggattacaggcatgagccaccgtgcccagacccagtgtctttttgtgtgaggaccactactaaagttttaagagatttcttaaaaaggcaatcgtcattctgaggcaaagattaccaacatctggattccaaaaagtggggaaaaatcagttattcatatatattaaaatgacacacttcatttccaactaccaagtacaatgttcacctttattctgtttgttttcgctttgtcgtgctactgaaatatgtgtgcatgtgtatttaaccaaagagaaactcactcctaaccccatatttagtggtgggaccatcccttatttagtgaggctgttttttttccccccagacccgagttgttgttgcccatgctgctgaattcccaatatgaataaatcataatcatatgattatactaaatcagaggtttcagtacccttccacaaagtgacaataaaatgctcattaaaaaaaagagtaggttgtgttcaatggtgttaatttaaaattttaatgctcaggccaaaatgccagaaagtgaacctcagtttcttggtaataataaggtgaactggcttccagcagagagattttgtggcttctgtatcctgccgctgcacttctcccttctccagcctcctttctatttggtggtgcagaatcaccttggtcagccctttgaccttgcctggaaaaaagtcctcatcagtgagtgagtgtgaggttagagtgataaagattctaaaggaatgccttgttttgattcaaatagttggattagtcacagagttacttaatccacacacatagtagaatcctccagcaagcttctttgttttcatcagagcttttgagagattattatattatatctctatcttttaaagatagagtagaaatccatctatgaagaatagttttaggtgcattcctgcctgaacacacatttggacagtcttataattatgtatcttcccgagatgcattttgagccatttctacccagaacttaaaaaaatatttcctatgagtgctggaggttcttgcttctcttaacccactaactttttgaagccataagaatatcttattaaggattatgcaaaataacgtcctacaaatcctgatattattacactgcccaaaaaacttcaaagcatcaggaaagtgttgtgtttttttttttttttttttttttttaactaaaccagattcagctggctaccccacttggctacagagtactaaagaagagactgaacttgatcctgctgcccttgcatacacaacactcccattgacgctagtgaagacttaagcgcatgaaaggattccaggatcaaaaggttagctctatggggagctgtgtctggctcaagcaatccatttttttctattgacagtgaaaacgttttatagttctttttcaaagttttcccaaacttttacaataacaggcaacttgtgaaaaagtgagaaggcatctaattgaactatatccagaggagatcatggcagagaccaacaggaagaaaaacatttccaaaccacagcgatattggtcaaatcaattgtatttgaagaataaagcatttgaggcgtcggctgagaaaaattttcattatgaaacttggttggactatgaagcagaatgtgagataaaataaaacacagagctcatgagtttttatctttgtctgctaatgacttatgctagcaggattatactttttttttgcattttatgagatgtatgaactaggaagaaaatacatgctatatctaaatggattagacgtgcagattcttaactaacatttaattcattgctagtaaaacaaatgccttaaaacatttaaaaaagtgaaattatcttaaggagataattaacaagcagagtagaatagcatttttgaagaaagtgtaatatggttctacactggcattttctgcatttattgaagatacttagtctatccaacaattcactcattcattctttcatgaaaccctgtctctactaaaaatacaaaaaaaaattagctgggcacgggggtaggcccttgtagtcccagctactcgggaggctgaggcaggagaatggcgtgaacccgggaggcagagcttgtagtgaaccaagatcgcgtcactgcactccagcctaggtgacagagcgagactccgtctcaaaacaacaacaacaacaacaacaacaacaacaacaacaacaaatttctttgtgcacttactatatgcccaatgctaatctaatagttttacaagacctcaattgaacaagtgtctgaggaaatggattgcatctaataaagcaagacacaccaactgtggatgggtggtgtgtctagagtattttgcattcctaaatcactcttctggagaaaatttgtatcaataattttgtctagcttcacctggagttacacattttgattggtaagtggcttctgtgatttgcctcttagaaatacattataatgttatcctaatatatgtactaggacagacaatgctacgttgaactaacttgaatagcatattttataatcataaaactgatataatattatagttttgatcttaatcctcctctattgtatgagcaatggaaagtcttggtgaggagcttgtctaaacatttctcttgcattttcacataattgggcttgacagtttcctgccattgtataggataacttcagttgatggtgatcatgtttttgcttaagggtcattgaattgtattagaaattttataccatattcttgtaatcctataagtcatttttgagttacattattgaaagtgaacaataatgtaccacaaaacaaaagttactcatgcagttaaagcttttttttgtacctaggtttagaaactacaagtccacagagaatagggctcgtgaaataaatgaaaatacacgctcatctccacccactccttgttgttggggcctggtcagatctggtgaaaacattaagccatttgccttaagtggtattggcaagttaatttattcaccttctggaaggtaccaggctagtgcttgcagaggcaagattttttttgggtgaagggagcaaacttttccacttaacatgtgcccatggaaatcaggtacttcttttttcagctaccttagcttctgttgggaatttgagggtgttttatgggttatgttcttatacggtggttaagtaggcttgctgaaatggatctagaaaagacccaggtcagtcactggttgaaaaagggttgacagaaaattaaggagatatgactgagagcagtttctctttcaggtccccaaatttctcctctagccaattcacattaaggtctgaaatttcccccattggtgtcattccggccattgtttccagaagggactttcaaaaatgcaaatatgttcctgtggagcatttgcacatttggtgagtttgtcagcctaaatgagcagttatctttggaactaagaaagaagggtcttaacagagaaccaggttggaggaagaaagatcctgagaacattcatgggaggtaggccaggggaagacatacagcatgaaactttggcagtttagaaacaagggggataactcttgttaagagagcttaagggtcacagaagacaaatataggtcatttcacagcctaatttggagtttgatcttcacagtagctctttatgggagatcagaaggccttagctcaggtatggggaaaagacttcctgtgaagtctttattctgcttgatcaaggctgcttgagggtgtcaaggggttcaagagaagttctgaggccaagttcaaactcaagggaaataattctctcatttcatgatttgtgccatggatccatgaaggagtggtcatcacgacctcagactctgctgcatttttggagggtttagtaagtcggcaatggcagtgacagctcagtccagttctcacagtgtgagaagaacttgggacatccagctaatggatctacaagagttccaggtggccctgaagaacttcagcacttctccttgcatatttgtattaacctggaaaattgcttcttgaagagaaaaggaagtgatatttttagaacaggatcagtatttccagcacatttattaatgggctagctcctcagtgtttacatggcaacaggataaactattattagtactgctcacatcatgaggtatcaggatgttttttggcgtggtagaccatctattcagatgaggaagtagagtgcatccatttatgaatttattgttgacatttcaactgtaattctttctcagtttcttccctaatgtcaggatacaaattttcatatccttgagagaggattttttgggaggggcaataaagacaaattttaaaattgaaaataaataaactggcaatcccataaagctcttgatcatatttagaccagtgagtgtttcctgaatgtttttgatgtttctgatcctgtgctgagcactgtgggggatgcaaatgaaagaaataatacatggtttctaccctcaaggaacttataatttattaagacacataaggcacttgaaccagttaaataatgagaaaagacagtatatgacacataaatgctttagaagtttagaaaaaggaaggaacagcagggttatttaaagagctaaaattcctgtagcttgcttctcttactttattggtggatgactccaaaactctgtaagaaggggaatagggagaatggaaggagtcttacccatctcttacttccttatgcaatgttgttcatgtacagtcagtgtctacggaaacttgaggactgatgggaaaattattttcagaaatggaggtgaatgaaaacagtcatggtggaatattttccaaccataactcttgccttctgttcatccatccgctcagagagccaagtgtacgtatgtagtcttctagctactaaattccattcctagatagtcataggtcttccaaggcccaaaggcttaccttgatttctgtttttttggataagtcccagtcaaatggctgccacagaagacagaaagtcatatatagattctccctttcctcctcattgcttcttcccttctctcacccccatgccccattccttatctttttactgatttctctctccgccctcctcctagtcatacatctacttttttctagtattcctagtttttttttttttcctcacagttgttcatggctctttgcacaccactgtctaagtctgaagaagtaaaaagagaatgaaataagtgttgccaagcaagacccttctcttctttccatgtttggaaaacaacctcttggaatacagctcttgaaatgtattgaattatctttgtgttttgtacacagcccagtgtacaaaactgggattgagggattgaattatcattgtgttttgtacacagcccggagtgctcaagacattccaaaaaggttaaatgacagcagtagcagtcacccctcttatgcaagacattctgggcttcatccaagataggtggagcattgctgtatcactctcatgcattcatttgctcatttattctctaaataaagagataagcagaggccagattccgttaggccttccagaccataatgaagaatttggttttgattctaagaactgtgggaggccaggggactgacatggtctgatttgtgtttttaaaagctatctctggctgcagtatgagaatggatgatagaggtcaaggtcaggagcaggagatcagttagagaagctattgcagaattccaggctacagataatggtggcttagactaggatggttgaagtggaaatgaagagaagtggaccaattcttgccaaaacatatatctgtaagccgaaccctatttcttatattagtgttgccttcatttaaggctgggggctggctccagcattttgatgcttgggttagtgtgctagaagctggcctggaagcctagaagtctggccccattggaccaccttactgggtcagatgtaatcctggcccactagccactcatgcctcttgcagggtcatgaagctgcttaaaatgtttgttcggtaacttaattactgtttcacctacattccattggcttaaattcttttcttttctttttttttttttaaataaaagagatgctggaagcgatggtttaatacattttaaagttcttttcccacctatttcctactctgtttgcattgtcatttgggatatttcatgcaagcaatctgttgaaatgagaattttaatgttgcgggcataatgttgctagtattgctttgaaaacaccacatcagctgtcaccaacactggacacggcagagtttatttcacagatatttgctaagggctgggtgtgcggaaaaaaaaaaaaaaggtatggcctctgcttccaaggagcttgagaggaagggaaagtaatacaaattcttgaacatcttttaactgctagccttttacatccacgactcattcagctgttgcaatacctctgaggtgagtgttactcttatccttaggatgaggaaaggggcccagccatctgtctcaaatcatactgctgtcgtgtacaagccgtgagctaaacccaaagtccatggccttcccaccttatgctgtaggtacacttcaaaagctgtcatgtcttctgtttgaataccacccctgccccttcacagctgcaagatcttgggaaaaatgtcttcatctctgtgagcctcagtttccttatctttaaaatatagataatagtatttacctcaaaagggtatgcatgaagcatatatgaaagttcttggcacatagtagccaggaactaaatattgttagtttccttttttggtgaaccagtgtatggcaagagaatttgtgatgtgattttggtgtagagtcttaagcaagcatggcaagtattttttgtttgttttcaacttcacagatgttagaaaagcttgtgttgtacatttatgtttagacattaggagagagattctttcttgggttgcaagattgtaggatttgtttgcagagtatctgtatctggacagagaggcattctcaagctcctggcccatcctacccaattcaggtagcaacaggaggggaaagaggcagttgtttgtataaggcatgtaaatgaaggctgaaaatcctgtagggtcaattcgtgtgtcctttggagctgaaattaatggatattttcctttgaagggtcgactctccaggctatatccaatacaatacagggacctcacactgtctttttgtgagggatcatatttgttttttcaggccttgatgaaaaccaatttgcctttcctgaaactagacatttaagctttgatgagctgacaaaggggggatgggcagacaacaataaccttgcagtctattttaggctcttaaaaataatatatgggacaatagtattgctagcttctccacaaagtgcccctttataagcatgtgtacaagataggaaactaccaacatgaggggaaaaaaggccaaaaggctgatcttaattattgaactgtgctgtgttggtttcttttagagtggattgtggaggtcacatttgtaggagattctcagttggtttactgtagtttgttaaaattattgagacataggtgatttcaactcttttttttttttttttttttgagacagagttacactctttcacccaggctggagtgaagtggcgtgatttcagctcactgcaacctctgtcccctgggttcaagcaattctactgcctcagcctcccaagtagctaggattataggtgcctgccaccatacctggctaatttttgtattgttggtagagacgggttttcgctatgttggccaggctggtcttgaactcctaacctcaggtgatccacctgcctcggcctcccaaagtgctaggattacaggtgtgagccaccgcgtctggccaattttaaccctttaacatttacttttactctttaagaacgacatttactctttaagaagaacttttcttcccttacacagtgtctgctttgaaccgagtctttgatatatagagaccctattagacccatcaaatgtcctctcagcccttggattatttctcttccaactctgttttcctataatatgatctactacataccagcagccagtctcgggcaatataacgaaggctagcagtatgttcacatggtcatgtgtatttctaaattttgcaaaaccaagatgtgttaagtgctgtcactgaagatcactttctttttccattctgacttcctcaccgtcatcattcgcctcctgtcagatagtatctgagtgatgggcacgttttggatctggctagaggaagttgaattggggatacatgtattttagtgtgatattttaatgtagtttgcagtccctttcatagtcatctgggtgaggaatggcttgtaggaatattcttaccacccattggacagctcaccagcatggatggggagcaaaggtgaaggccataggtcctaaggctaggagccagtcctatggcactcatcctagaaatatggggtagtggagaaaaatgaggctggaaacaaggtttgagaagctcaaatgtaggaaattcttacctctgtagacataaaattgtgagcagaagaattgatgccagccaaatatattctctcctgtttggaatatatgcagtgatactgagtatacaattataaactcactatgtgtgtgtatttgtgtgtgtatatacatacttttaattttcttttttgttgagaatagtgtggaattgattttgtcagaatccctatgtttgtagggcacgagcctgaaggcatggagcaagaatgtctgtgtgagaagacacatgatttctgcctcctattctggatctcatatatgtatcttattgcatctgttgcatcttgtcctgagacagcctgatggttccagaggaaagtgtgcaaaattgccactaaagcaagagacatgctctgagaaacaagcattccatgacaaactgtcacacattttcatcaataagtcacggtatatagtataagaggaattcaatgaatttctcttatgtagcttagtgcagtgtaggaacgtttgaattgttctcgtatatgccttaatttcaggttaattgtgtatttttttttcagaattactgttcatatcaaaattcagatatgatttgggtaatgggttcattagaagcccaaaccccagcatcacacaatatacccaagtaacaaacctgtacatgtacctcctgaatctataaaaaaacaaaaatagctgggcacggtggctcacagctgtaatctcagcactttgggtagccgaagcaggtggataacctgaggtcaggagtttgagaccagactggtcaacatggtgaaacgctgtctctactaaaaatacaaaaattagctgggtgtggtggtgggcgcctgtaataccagctacttgggaggctgaggtaggagatttgcttgaacttgggaggcggaggttgcagtgagccaagattgcgccactgcactccagcctgggtgacagagtgagaccctgtctcagaaaaaaaaaaaaaaaaaagataaaaagaaaacaaaacagatatgacaggaaggacatattcctgttgaaagccatagtgtaacaatcactacaaagagaataaaatacctaggaatccaacttacaaggtatgtgaaggacctcgtcaaggagaactacaaaccgctgctcaacgaaataaaagaggacacaaacaaatggaagaacattccatgctcatgggtaggaagaatcagtatcatgaaaatggccatactgcccaaagtaatttatagattcaatgccatccccatcaagctaccaatgactttcttcacagaattggaaaaactactttaaagttcatatggaaccaaaaaagagcccgcatagccaagacaatcctaagcaaaaagaacaaagctggaggcatcatgctacctgacttcaaactatactgcaagcctacagtaaccaaaacagcatggtactggtaccaaaacagagtatagaccaatggaacagaacagaggcctcagaaataataccacacatctacaaccatctgatctttgataaacctgacaaaaacaagaaatggggaaaggattccctatttaataaatggtgctgggaaaactggctagccatatgtagaaagctgaaactggatcccttccttacaccttatatgaaaattaactcaagatggattaaagacttaaatgtaagacctaaaatcataaaaaccctagaagaaaacctaggcaataccattcaggacataggcatgggcaaagacttcatgactaaaacaccaaaagcaatggcaacaaaagccaaaatagacaaatgggatctaattaaactaaagagcttctgcacagcaaaagaaactaccatcagagtgaacaggcaacttacagattgggagaaaatttttgcaatctacccatctgacaaagggctaatatccagaatctacaaagaatttaaacaaatttacaagaaaaaaacaaacaaccccatcaaaaagtgggcaaaggttatgaacagacacttctcaaaagaagacatttatgcagccaacagacatatgaaaaaatgctcatcatcactggtcatcagagaaatgcaaatcaaaaccacaatgagataccatctcatgccaattacaatggcgatcattaaaaagtcaggaaacaacagatgctggagaggttgtggagaaataggaacgtttttacactgttggtgggggtgtaaactagttcaaccattatggatgacagtgtggcatttcctcaaggatctagaactagaaataccatttgacccagcaatcccattactgggtatatacccaaaggattataaatcatgctgctataaagacacatgcacacgtttgtttaatgtggcactattcacaatagcaaagacttggaaccaacccaaatgtccatcaatgatagactggattaagaaaatgtggcacatatacaccatggaatactatgcagccgtaaaaaggatgagttcatgtcctttatagggacatggatgaagctggaaaccatcattctcagcaaactatcacaaagacagaaaaccaaacactgcatgttctcactcataggtgggaactgaacaatgagaacacttggacacagggtggggaacaacacacattggggcctgttagggggtggggggctgggggagagatagcattaggagaaatacctaatgtcaatgatgagttgatgggtgtggcaaaccaccatggcacatgtatacctatgtaacaaacctgcacattgtgcacatgtatcctagaacttaaagtataataataaaaaaagaaaaaagaaagaaagagatagaggaaacaaaaaggatgccataagtataagttgaaagaaaatatttgtggtatttgccagctttaaaaaagtttgtaagttgtgtgatttctgtactcattctcaataaatgttcattatttgtatctaattttatgtattttttcttaaagagggacacaaaatttgcatatgctttaggtttcataaagcctggacttgccctgtttcataccaatgttgtggacatattcatagcagtctgacagtacctgtgagatgaggaagcaacatgctgtagtggaagaagcagccttgattctaccactaggagctgtgtaacttcagcttgtttcttagcctctgtgaattttggtgtcctcagctgtcaagtttggatgttgatccatcacagaattgttgagacttaaaggaaccctcagtgtacttcttggcatgtgataaacactcaataaatataatttccttttttcacttgagctctctctgatggtttacagatttatcttaggtcagggacccaggtgaggaaatgcgttgtcctttcaaaatgaattttgatctgagggtagtaggtagagagttggggtttcccctgggattcttgtctttaataaacccgagacaaaatgaatcacaatggtgttttctctagatgtaaaacaaagtatgcagtgccttcatcagctgtgtagagtattgggctgaaagtattccaatttagtgtgtctgccactacacacacacacacacacacacacactcatttggtatgacccaaggattacattattctgaatcactgcagttttttgacatggcttcattcttcaatcaaaaatattgatgaacaaagccctgggccaggtgctggattcccttgaaatgtaggagtctgggaactaggatttggcattcacgggtgtcctaatgagcctggagcagcacattctttccaatatgtgtgctttggctatatgtaccagcgatagcctctatgaggtggggatgggacgggaaccccaggttagctaaatactgacttgctgtcagggtatgatttagtcatcatagcagactgggttaatacctatgatactggactatgaactcttttctttaaggacaagacacaagactacttttttcagtgcccgccatggctagtacatagtaggtgtttgtagcatttattgaattgatttacagtctacattcagtaggagtaaaaaaagccttttaaagtgcccaaaggattttcctttttgaaacaaaattgcagctttttgctgggcgcggtggctcacagctgtaatcccagcagtttgggaggccgaggcggatggatcacctgaagtcaagagttcgagaccagcctggccaacatggtgaaaccccgtctctactaaaaatacaaaaattagccacacgtggtggcaggcacctgtaatcccagctacttgggaggctgaggcaggagaattgcttgaacccaggaggcagaagttgcagtgagccgagattgcgccactgtactccagcctgggtgacagagtgagacatcatctcaaaaaaaaaaaaaaaaaaaagagaaagaaaaaagaaaaagaaaattgcagcttttgatgaatagcctgataattatgtcccttagcctgctgttgtggaggaataggagtcattttgaaatggggaatcagaagcagtctgtttcacactttgctcacaagtgattcctctgagtgaaagaagtcaaaccaaagcaagtccagggaagtctgagaagttagcatacttgcaaagacaaaacagccacaagtcaactgtcagctgagtgagtgcctgtctggacgttatcctgcaggcagttaggaagaaacattgtttgaagacgcctgtcaccagcacacatgactgatttctcatcagaagagggattgtgagtgaaataagaaaaagtctgtgtaatatgtgtcatgatgagttatacatttacctattaactgtatacaaaacctttatgcatatagattatccatattttatttgggggccatctggttaatttgcctgctttctaaactattgagtcaaataagctcactcaggtattgtcagaatgaacccacctaatctggttaacattttggtgtctgggcaaggtctacccaggatcaaatctgttgacacccttctctccaaccccagccctgtccctacctacacacacgctttgtttaaaaatactcattggtgcttactctgtgtcaggtgtcaggtagtgtgctagcactgaggatgcatagtcctttccctctttttttttttctttgggacagtgtcttactctgtcacccaagctggagtgcagtggtgtgatcgtggctcactgcagccttatccttgacctcctgggctcagctgatcttcccacctcagtacctcctgagtaactgggactacagctgtgcactaccaccgggctaatttttcagttttatgtttttgtagacttggggtcttactatgttgcctaggctgatcttgaactcctggactcaagcaatcctcctccctcagcctcccaaactgctgggattacagttgtgagccactgtacccggcctcatcatatccctcttgaagcttgcagtgtaggacaggtgaacccagcagccacatctcttatttgggtattgcgggagacctggcatagtcagcatccagcagtgtttccagagtggctggccttgctgcttctcctcacttgctcctcaagggcaagatgatatgcaggttaccactgaagcaaatgtcccatccattgtcttctggtccgcttaaaccttgatctagtaattaattatatgaaagaacagaaaaagtttcagagaatgataatctgttttaaaattttcttattcatttttaatagttgtgtttttggggtacatatgatttttgatatgtgtatacaatgtgtaatgatcaaatcagggtaattggggtatctgtcacctcaaacatttattttttctttgtgttgggaacattgcaattcttctcttctagttattttgaaatatacaataaattatcattaactataatttccctactgtagtatcaaatactagaacttattccttataatgataatctctttaatagtcatatttaaatgccaatttacaaatggagtaaaatatttaacagaattgaattgataattttgaggcctttgttaataactactcttaattgcagcaattttgttttggacagagattatgggaataaattttaattctggttggaaaatagtactgaaacagcacttgtcttattctttcaaatttttagtacttgggtatttggagtcattgagatttactctttgtatatgcaggaacattagttgtttcagactggacaatggctggttataagtagttgaataaaatccctgcagttcatccattcttctcctaccagcaggtgtcattatggaaatatgaaaatactgtaaattccagagttgtaggaactagctgtgagaaagaaaagtaacactttggatattaaaaaacaacaaaaaatgaaaaaatcatttggcactaagcaaggatggcatgtttaattactgatttggcagtgttctacagtatgatgtaataggattttaaagcacataatttattttaattagattaagtaaatatttataagaaccattctaggctcataggagtcacaaaagaaaagtaagatgtgattcttatcctcgaggagccgacatgatatctgaggatacattaatgaaataattagttcatagaatgaatcaatctttcttttttacatgctggattgaagaacatagacagtaaaagttgcaaaagctggagggactgagtagtgtttttgattgtgggttaatcaaagaaaaagttttaaaaattcaagtagggaggaacttcaaaataatttggtaacttgatagctcattccttcctttcttgctaactgcctatctctcgctataatctaaagtaataattataataattacatattacatatgtatccaaggatgtaacaattggatttaacagtttactataatcggccgggcgcggtggctcatgcctataatcccagcactttgggaggccgaggcgggcagatcacgaggtgaagagatggagaccatcctggccaacatggtgaaaccccatctctactaaaaatacaaaaattagctgggggtggtgatgcgtgcctgcagtcccagctactcgggaggctgaggcaggagaatcgcttgaacccgggaggcggaggttgcagtgagccgagatcgcgccactgcactccagcctgggagacagagtgagactccatctcaaaacaaaagaaaatgaaaaaacaaaacaaaaaaatggttttctataatcaagcgactaatatgatcaaatctttctaaaaactaaggtaaacattataagtgagcatttgtattaggagacttttccaggaacctggatcaggttctaagtgtgctcggtcagggtcagtgcttcattcaccctgttttcccctctagactgtgaggttttctaaggcatgggatatgtggcattcctctttgcattcctggcactcttaattctgcctctggatctgtagtgagctcttagtacatgtttgttgaatgacagtatcaccaaaggatagggtatttacagtcctttgtacattatattgttagaatgaatgcatattgatactagactaggcaacctcaggttgaatatttcagaaaactggattgagaaacctggcttgaaaagttgatagcataggcagccgcccccttctgcgctgtcacgccgagccagcgcctgggcctggaaccgggccgcagccccccggcttcgcccaccatctccctaccatggacccccgcaaagtgaacgagcttcgggcctttgtgaaaatgtgtaagaaggatccaagcattctgcacacccaggaaatgcgcttcctgagggagtgggtggagagcatgggaggtactgctactcagaaagctaaatcagaagaaaataccaaggaagaaaaacctgatagtaaggtggaggaagacttaaaggcagacgaaccatcaagtgaggaaagtgatctagaaattgataaagaaggtgtgattgaaccagacactgatgctcctcaagaaatgggagatgaaaatgcggagataacagaggaggtgatggatcaggcaaatgataaaaaagtggctgctattgaagccctaaatgatggtgaactccagaaagccattgacttattcacagatgccatcaagctgaatcctcgcttggccattttgtatgccaagagggccagtgtcttcgtcaaattacagaagccaaatgcagccatccgagactgtgacagagccattgaaataaatcctgattcagctcagccttacaagaggcgggggaaagcacacagacttctaggccactgggaagaagcagcccatgatcttgcccttgcctgtaaattcgattatgatgaagatgctagtgcaatgctgaaagaagttcaacctagggcacagaaaattgcagaacatcagagaaagtatgagcgaaaacgtgaagagtgagagatcaaagaaagaatagaacgagttaagaaggctcgaaaagagcatgagagagcccagagggaggaagaagccagatgacagtcaggagctcagtatggctcttttccaggtggctttcctgggggaatgcctggtaattttcctggaggaatggctggaatgggagggggcatacctggaatggccggaatgcctggactcaatgaaattcttagtgatccagaggttcttgcagccatgcaggatccagaagttatggtggccttccaggatgtggctcagaacccagcaaatatgtcaaagtaccagagcaacccaaaggttatgaatctcatcagtaaattgtcagccaaatttggaggtcaagcataacgcccttctgataaataaagcccttgctgaaggaaaagcaacctagatcacattatggatgtcgcaataatacaaaccaatgtacctctgaccttctcatcaagagagctggggtgctttgaagataatccctacccctctcccccaaatgcagctgaagcattttacagtggtttgccattagggtattcattcagataatgttttcctactaggaattacaaactttaaacactttttaaatcttcaaaatatttaaaacaaatttaaagggtctgttaattcttatatttttctttactaatcattttggatttttttctttgaattattgggcagggaagatacttatgtgtggaagattattgctctaatttgagtgaaataaaagttattagtgcgaggcaaacataactcatttgaggataaaaaaaaagaaaagttgatagcatagattctgaagttttctcttttgattccacttctccatccgaggacatatatttcaaaaagtatttcagtaagcgatgtgattccaggacattgtccatgagatatagaggacattgtacttcatctaaataaaactgggcctaattttaggcagaaggatgtacgtagtgttattttattaccttttcaacaactttcttagtaatcagtcattttcaatgaagacagtttgttcaccaccatatttgaagactattattaatttaccagctgctatatggtaaggggtctgtcctcagcctacctttggtagtttgaactagttatactttgttcatcattttctgacatctccagctgcttactagacttctctgttttgattttccattgtcacctcctatgtaacatgtcaaatagggaaatcatcgcttttacctataaaccacatcttcctttaaggccataccttttcttttaatgttaccatttattttccagttccccaggtgaaaaactttgatgtttccttgttctcaaccccttccccgatccaatcaatcaaaatagtatctatacttcctttgtgatgcctatgataaccattcttttcttcctttctgtttctattaccaagaccctggattagaccacgcatgaatgacatagcttcttgaatcatcctattagcgttttctcctcttttaccccctattagtgagtaggaacattttagttagaattactcaaatatcagtaccaagtccacacccttaatcagagttgctagggcccttcatgacttgctgatgatcactctaactcaactcttgtacccttaaaactgtttgctctggtcatatagaaaaatgcaattttccaatctagccatgttctctttgacttccagattatttgtattgtggtagaatacacataacataaaattgaccattttaaccattttgaagtgcacagttcagtggcactaagtatattcccattgttctgcaaccatcaccatcatccatctcgagaaatgtttcatcttcctaaacagaaactctgtacccattaaacactaattacctatttcccctcctcccagcttctggcagccactattctactttctatctctatgaatttaactactcaaagtacctcatataagtggaagtatacaatataggtccttttgtggctggcttgtttcactttgcataatgtcctcaaagttcatctatgttgtagcatgtgtcagaatttccttcctttttaaggctgaataatattccattatatgtctatgccacattttgtttattcattcatccactgagagacatttgggttgcagtttcttctctttaagtgtattctgctaattaaaaacaggttactcttcctgccacttctttcagtcatgttactttgctgctcagaagccttcaatgagttcctttttacagatagggtaagtcgcagcatgcacagcataacactcaaggctcttgcctctctgggccctgacctatgtataaaacctttctgttaattattagtcttcaacatttattcatgaaacatagtttttgagtgtctggtatgtgttgggccttggggtaagtgcagagtaaaccaaatagatattgtcccttaccctatggaactgactttggagttaagtgattccttcgctcaagccagaaggctctcctttttaccttggaagctggctacttcacccaacatgaatataccaaagaccatttggtaaatgaccagctcaccaaagctaattctgcaaaaatcacttgaccaaataatgattttgctgaaaaattgaggtttatattttttactttgtccctgtcatcactgctgttctcttcctgggcatgcattggccaactgctgtttaatatgaactttgcctgtttttcacattccagactctgagaatttttagaatggtcaacattttctacgggatggtcaagtgttttccatttgtttgtttattttttaaagcactgttttttgtcttaattacttttgcctctgtccctattgctcctgcttctgcaccttcctgtgccctggtgcaatggctatgagaaattgctctaaaccctgtgtaaaggatttgccagatgattgctcagtgaattgttcattcgttgagttagtcagtaagaagatgatcatttggcaaattagtttccaaacattttaaaatttcttctctcccttgtaggaaatcaaagggaagcattttctactatttttttcaggtctatcctctctgtttgaaccataatatctttttttgagatggagtcttgctttgttgcccagctggagtgcagtcacacgatctgggctcattacagcttctgcctcccaggtttaagcgattgcagcgcctcagcctcccaagaagctgggattacaggcatgtgccaccacacccaactagtttttgtatttttagtagaaatggggttttatcatgttggccaggctggtctggaactcctgacctcaagtgatccacctgccttggcctcccaaaatgctgggattacaggcatgagccactgtgcccagccaaaccataatctcttttaatagctctgttgatttgtttttgggagtagccttcttgtgagtaggcttcttgggagtagccttcttacatcttgtgctcagaatcagtagttgcttggttaatctaaagaagctggttaaggtgtagaatcataaaaacaatatagacacatcttttaaaataaaactccaatgtgcattctattaaccaatcctttaggatcaagacattttcttccaaaatgggtccactaattattcaaatcatctctctttcataaaccatactcattatgaattacctatgatttccagtttcagtttctttagacaggagcaagatcttaaagacactgtgatacaatgagtaaagaatcctggtgtatttttactatttttccctgccattaacacttgtcatatacagtttaagagcagattatcttagcaacatatctgtattgattctttaaaaggattcaacctaatttttaatgtaactatttttattgtcacattcatcagacaacatatttaattaaatatgattataataacaaatacaagtggcacaacttttctatcaattgcctgttggtaagcgaaccatgcaattgctgggagtagaagcctacaggcttacgagggaggaggctgcgatccaggagcactgagcatgcctggtatcagccagtatgtttccctgaggacatagggagcactggttaaatgtatagtcatttagtgcaggttggctatacaggcttttactgtatttgttcatccttatagacaaagctgtgttattgcttactatcttgtaataaagtaggagttgaggtgagatctagcagaaattgatatggggaactgcacaaatccttcaggttcaaatgacaagaacagggaatatttacatttgatgtaaatttgcatcacttcatcagaagtccagaacctgtgggaatgggggtgcagagagtgaagaagcagttttagactgacatcgttggcaactttattttggggcagacggaccatctctgccaggaactctactcctctgcctaaatgaccatgcggccccccttccaagggaagtctctaggtggacatcatgtgactgcccaccccttggtctgcacccaccttccatgtaaggaagtgctagtggccttctatcagggtctcttccactgacttctgtatgtatatgtgtgtgggaaggaattgtgtgttgggggtaggaggtggggtcagggctctgtgcctctgcagtgcatccagaaattcctcaacatttttcacagtgtatatgccctctctagtttccagtactgataaaagcttttccctgtttttgtattccgcttgtcacttccctggaaatccacatagaagggattggaagtctgtcctcttttattccaaatcttcctcttccccttcacctcaaactttgtattttaggctcttaaacgggtctgtacataactttttcctctgctataagcacataactaataaactatgggttagagtaaggtaattggcagttctgtttctcagtgttcgtaccattaaaatgatttttccaaatcagactcaaggcaatggaataataataatgagaagttattttgcactgtgctttatggttttaccatgatttagtgcttcatttaatgagacaaataaccagacaaggccgggggtggtggctcacgcctgtaatcccagcactttgggagatcaaggtgggaggattacttgaggtcaggagttcaagaccagccttggcaacatggtgaaaccccgtctctacaaaaaattaaaaaattagcagggcgtcgtggcgcatgcctgtacctgtagtccaagctacttgggaggctgaggtgggaggatcacttgagcctgggaggtcgaggctgcagtgagctatgatcgtgccactgtactccagcctgagcaacagagcaagatcctgtctcaaaaaaaaaaaattaaaaaaaaaataaaataaaataacaagactacttgagtggagtgtttttggaacaaaacattacctgagatgagagaggcattatcgtctgctttcagcaggacactctgcttggagccctggtctgggtactcttggattttctgctctcagcattgtctcatgtaggtacagttacatcaggtcattatcttgttggggctattactttaaaaaaatagatacagtttttgacaaaaaagaaagatagacaaataaaatgtcaaggacagccaagacagaccctagcttcagtcttgaggatggctttcagaaaatcacggctggatttccttgcctgtgatcttgtttttgaactgcctaaacctgcactgtcacaaatgggcacatttttgctcgaccaaagaaaagatgaatttggtggctttggaacaacattttcttcatttgctcaaccacagggagaataagggctatttgagaaatagcccttggacagcaggcatctttcttctaacagaagacgaaatggatcctccatctgtctcaccatacaacccttgctgtatgtgtcaacttgggttgaaatcttatagatgctgttgtcgatctctgaactcaaaaatctcttgtattactataaattaccctcattgacttccctaagtgttctcagatttctcttctaaaactgtccctccagggatctgcagggaagatgaagattttttgtttgtttgtttgtttgttttttgggtgggtaggggggacaccaaatgccatgaactcagtccctgctttgatttgggaagctgaccatatctgaggcaattctcctacagctgtggttcaattctcctcttcttttcattacctcccaggctaggagcctctgattgtgtgaaggtggggtaagtagcatgactctccataaagaaaagcccatgcttactcccaagatgaggcagtgagccttaataaaaaaggtgctggaagtaatccccctttaagacagtctaacatgagaaatgctcaagagaatattgtgcacatattagacacccaatcagtatttgttgagtgagtacatgaatgcagcagtgggtggcagtcatgctaggccatttctggtgcagcctccatgtctgtttacctcttcagaccttaattcttcatctcctttcctctccttatcatggttccattgttgctctgctttttcttgctaactcaggggaaaagacaagggctagtttggggattacatttcaaggctgcactgaactgatggcaattgaaggacagagaatgggaactacaaaggatgcttctgaaccagattcctatataacttctctcaaatgcagacatagatacctgcctctgccggtcttgatgctaggatagggctgatggtcataggttgccaaagagttttttttttttttttttttttttttggagacagagtctcacacagtggtgccgtctcagctcattgcaacctccaactcccaggttcaagtgattctcctgcctcagcctcctgagtagctgggactacaggcatgaaccactgcacctggctaatttttgtacttttagtggagacagagttttgccatgttggccaagctgatcttgaactcctggcctcaagtgatccacccagattggcctcccaaaatgctgggattacaggcatgagccaccattcccagccccaaagagctttcttagaagagcagctgctcagtgccccagctgggtttctaatactttataaactaaggtgtttaaagtatgctcatgtcacatctccttgttctagcattgttaggatgaattgcgaactcttgactctgaaactgggaagtgctctcttttaacttctcagtttttaaaaacatggcttgtgtctgttcccattgtcatttctggccttcatatggccacaactacctgttaagtcagtggaaaacagactgtggcttttcttaggtgttttcttctttttttttttttttggttagggtttttttttttttattatactttaagttttagggtacatgtgcacattgtgcaggttagttacatatgtatacatgtgccatgctggtgcgctgcacccactaactcgtcatctagcattaggtatatctcccaatgctatccctcccccctccccccaccccaccacagtccccagagtgtgatattccccttcctgtgtccatgtgatctcattgttcaattcccacctatgagtgagaatatgcggtgtttggttttttgttcttgcgatagtttactgagaatgatgatttccaatttcatccatgtccctacaaaggacatgaactcatcattttttatggctgcatagtattccatggtgtatatgtgccacattttcttaatccagtctatcattgttggacatttgggttggttccaagtctttgctattgtgaataatgccgcaataaacatacgtgtgcatgtgtctttatagcagcatgatttatagtcctttgggtatatacacagtaatgggatggctgggtcaaatggtatttctagttctagatccctgaggaatcgccacactgacttccacaatggttgaactagtttacagtcccaccaacagtgtaaaagtgttcctatttctccacatcctctccagcacctgttgtttcctgactttttaatgattgccattctaactggtgtgagatggtatctcattgtggttttgatttgcatttctctgatggccagtgatgatgagcattttttcatgtgttttttggctgcataaatgtcttcttttgagaagtgtctgttcatgtcctttgcccactttttgatggggttgtttgtttttttcttgtaaatttgtttgagttcattgtagattctggatattagcccttcgtcagatgagtaggttgcgaaaattttctcccatgttgtaggttgcctgttcactctgatggtagtttcttttgctgtgcagaagctctttagtttaattagatcccatttgtcaattttgtcttttattgccattgcttttggtgttttagacatgaagtccttgcccatgcctatgtcctgaatggtattgcctaggttttcttctagggtttttatggttttaggtctaatgtttaagtctttaatccatcttgaattgatttttgtataaggtgtaaggaagggatccagtttcagctttctacatatggctagccagttttcccagcaccatttattaaatagggaatcctttccccattgcttgtttttctcaggtttgtcaaagatcagatagttgtagatatgcggcattatttctgagagctctgttctgttccattggtctatatctctgttttggtaccagtaccatgctgttttggttactgtagccttgtagtatagtttgaagtcaggtagtgtgatgcctccagctttgttcttttggcttaggattgccttggcgatgcaggctcttttttggttccatatgaactttaaagtagttttttccaattctgtgatgaaagtcattggtagcttgatggggatggcattgaatctataaaattaccttgggcagtatggccattttcatgatattgattcttcctacccatgagcatggaatgttcttccatttgtttgtatcctcttttatttccttgagcagtggtttgtagttctccttgaagaggtccttcacatcccttgtaagttggattcctaggtattttattctctttgaagcaattgtgaatgggagttcactcatgatttggctctctgtttgtctgttgttggtgtataagaatgcttgtgatttttgtacattgattttgtatcctgagactttgctgaagttgcttatcagcttaaggagattttgggctgagacagtggggttttctagacatacaatcatgtcgtctgcaaacagggacaatttgacttcctcttttcctaattgaataccctttatttccttctcctgcctaattgccctggccagaacttccaacactatgttgaataggagtggtgagagagggcatccctgtcttgtgccagttttcaaagggaatgcttccagtttttgcccatttagtatgatattggctgtgggtttgtcatagatagctcttattattttgaaatacgtcccatcaatacctaatttattgagagtttttagcatgaagggttgttgaattttgtcaaaggccttttctgcatctattgagataatcatgtggtttttgtctttggctctgtttatatgctggattacatttattgatttgcatatattgaaccagccttgcatcccagggatgaagcccacttgatcatggtggataagctttttgatgtgctgctggattcgttttgccagtattttattgaggatttttgcatcaatgttcatcaaggatattggtctaaaattctcttttttggttgtgtctctgcccggctttggtatcagaatgatgctggcctcataaaaagagttagggaggattccctctttttctattgattggaatagtttcagaaggaatggtaccagttcctccttgtacctctggtagaattcggctgtgaatccatctggtcctggactctttttggttggtaaactattgattattgccacaatttcagctcctgttattgatctattcagagattcaacttcttcctggtttagtcttgggagagtgtatgtgtcgaggaatttatccatttcttctagattttctagtttatttgcgtagaggtgtttgtagtattctctgatggtagtttgtatttctgtgggatcagtggtgatatcccccttatcattttttattgtgtctatttgattcttctctctttttttctttattagtcttgctagcggtctatcaattttgttgatcctttcaaaaaaccagctcctggattcattaattttttgaagggttttttgtttctctatttccttcagttctgctctgattttagttatttcttgccttctgctagcttttgaatgtgtttgctcttgcttttctagttcttttaattgtgatgttagggtgtcaattttggatctttcctgctttctgttgtgggcatttagtgctataaatttccctctacacactgctttgaatgcgtcccagagattctggtatgttgtgtctttgttctcattggtttcaaagaacatctttatttctgccttcattttgttatgtatccagtagtcattcaggagcaggttgttcagtttccatgtagttgagcggttttgagtgagattcttaattctgagttctagtttgattgcactgtggtctgagagatagtttgttataatctctgttcttttacatttgctgaggagagctttacttccaagtatgtggtcaattttggaataggtgtggtgtggtgctgaaaaaaatgtatattctgttgatttggggtggagagttctgtagatgtctattaggtctgcttggtgcagagctgagttcaattcctgggtatccttgttgactttctgtcttgttgatctgtctaatgttgacagtggggtgttaaagtctcccattattaatgtgtgggagtctaagtctctttgaaggtcactcaggacttgctttatgaatctgggtgctcctgtattgggtgcatatatatttaggatagttagctcttcttgttgaattgatccctttaccattatgtaatggccttctttgtctcttttgatctttgttggtttaaagtctattttatcagagactaggattgcaacccctgccttttttttgttttccatttgcttggtagatcttcctccatccttttattttgagcctatgtgtgtctctgcacatgagatgggtttcctgaatacagcacactgatgggtcttgactctttatccaatttgccagtctgtgtcttttaattggagcatttagtccatttacatttaaagttaatatggttatgtgtgaatttgatcctgtcattatgatgttagctggttattttgctcgtcagttgatgcagtttcttcctcgtctcgatggtctttacattttggcatgattttgcagcggctggtaccagttgttcctttccatgtttagcgcttccttcaggagctcttttagggcaggcctggtggtgacaaaatctctcagcatttgcttgtctgtaaagtattttatttctccttcacttatgaagcttagtttggctggatatgaaattctgggttgaaaattcttttctttaagaatgttgaatattggcccccactctcttctggcttgtagggtttctgccgagagatctactgttagtctgatgggcttccctttgagggtaacccgacctttctctctggctgcccttaacattttttccttcatttcaactttggtgaatctgacaattatgtgtcttggagttgctcttctcgaggagtatctttgtggcgttctctgtatttcctgaatctgaacgttggcctgccttgctagattggggaagttctcctgggtaatatcctgcagagtgttttccaacttggttccattctccccatcaatttcaggtacaccaatcagatgtagatttggtcttttcacatagtcccatatttcttggaggctttgctcatttctttttattcttttttctctaaacttcccttctcgcttcatttcattaatttgatcttccatcgctgataccctttcttccaattgatcgcatcggctcctgaggcttctgcattcttcacgtagttctcgagccttggttttcatctccatcatctcctttaagcacttctctgtattggttattctagttatacattcttctaaatttttttcaaagttttcaacttctttgcctttggtttgaatgtcctccagtagctcagagtaatttgatcgtctgaagccttcttctctcagctcgtcaaagtcattctccatccagctttgttccgttgctggtgaggaactgcgttcctttggaggaggagaagcgctctgcgttttagagtttcccgtttttctgttctgtttttttccccatctttgtggttttatctacttttggtctttgatgatggtgatgtacagatgggtttttggtgtggatgtcccttctgtttgttagttttccttctaacagacaggaccctcagctgcaggtctgttggaataccctgccgtgtgaggtgtcagtgtgcccctgctggggggtgcctcccagttaggctgctcgggggtcaggggtcagggacccacttgaggaggcagtctgcccgttctcagatctccagctgcgtgctgggagaaccactgctctcttcaaagctgtcagacagggacatttaagtctgcagaggttactgctgcctttttgtttgtctgtgccctgcccccagaggtggagcctacagaggcaggcaggcctccttgagctgtggtgggctccacccagttcgagcttcctggctgctttgtttacctaagcaagcctgggcaatggcgggcgcccctcccccagcctcgctgccgccttgcagtttgatctcggactgctgtgctagcaatcagcgagactccgtgggcgtagcaccctccgagccaggtgcgggatataatctggtggtgcaccgttttttaagctggtccgaaaagcgcagtattcgggtgggagtgacccgattttccaggtgagtccgtcacccctttctttgactcggaaagggaactccctgaccccttgcgcttcccaagtgaggcaatgccttaccctgcttcggctcgcgcacggtgggcgcacccactgacctgcacccactgtctggcactccctagtgagatgaacctggtacctcagatggaaatgcagaaatcacccgtcttctgcgttgctcacgctgggagctgtagaccggagctgttcctattcggccatcttggctcctccttcaggtgttttcttaaattaacttctggggcaacatcaactctggaggcactgtctcctttctctaccttaaggataattctgagactctaaggacagaatggtttctttatagactttcagccaggtgcatttgctgtgaggctaaacatccaaacagatttagagtgagcgacagtgggtattcaggtcaagtccaccagtttgatgttccttcttttccatgcttttttccttcagaatacagtcaagtctccaaaaaatgtatgtgtagcttaaacaaattccgttatatgatataattttgctttccattccagccagtgagtgttttccctagagtatgcagaagatgatagaaaagaacctgttgttacctttatcatttttgttcccatgtgctgctcagagtgtgacgttttcattgtgccaagtataattctaatatttattgatacaacttgttgccatagtttctatacacgatcttagccaaaaggccgagaggcaataccacatgtctctaagtggaagctagttctctggtctcaaccaaagtcatagtcatttgttccaactttggaggaaaatctggatgtgttggacttaactgagaaatgtatctccaacatggtgccttccttagggattttcaagggttaattttgaagatatgtaattttagtcctaagtgctgacttttgaatgtaactgtgacctaagatattatacaacagtagtgtctgattcctctttatagtgtcttttgtgataggtaattcacagactggttacagtctgttttccttttcttttttaacctaaaatattttctagttttctcaggtgatgaaattgtaggttaagctgggatttgtaaccttctctacatttgctatatagcgtctatgtaatctttctattggtctgagacattgcagaggaaacctatagccatgcctggagccaaaatgttggacataacccaatttgctttttttttttgttttgtcttgtttttagagttagttgatgggtgctgagatactaaggtactaagaatgacaaaaataaggaaagacttctgaaatagacaacacaaaataccaaagctcaattctttcacttttcttgatgatgaccacactgtttacagtggattgtaggttgttatagtgatgggaaaggtctgtgctgatgggcattgggaaagatgttgcaatctgaagatggactttgtctaatgcagtgtaaccgacaaagccaggtctcctggtatgggctcagtctctttgtagtttaacattcaaagaaacaacagtccaacttgagaaactttgaagaataatgtaaatatttgctgtaagttttatttttaggaggctttgcatagggattttatatagtgaaaggatacagaaagcttcctaaacagttccttgacacctctttccttcttgccagtttccgctcatgacagctatgaaaatctctctcttgctctgcctacagtgtcctcactctgggtggttctctcatcctttgtgcccctgcacaccacactgaccttccctggtgtatgcagtcctctggaacatgttctgtctagctctggtgggttttcttgtgagaataagccacattgctccagaattttggtaaatgaaattttcgtattagtaggaatattttgcttatttaaaactctttgatcttggcttgagacatattgcttgttctcactttgatatgatgtgttcaataaagtcatctaagaccctgcaaaccagatccatctgccttcacactttcattaaattagtaaggtcactatgaggagaggtatacagttactgttacagtatttaccaaacagtgggcccacagccacactcctcacttctccttttggtctctccttagaaataaagttgtttaaaaccatttgcttccagaaggccatatataaaggtagtaaatttaggtgttaattctgagcatggtagtggtgctgtgcctcattgctttccagtctgaggatgacttctaccccaaattattctttgagttactcctagcaggatgagagcaggacacagggctctaggggagaggaaaatgactaagatgatttagcatatctttatcctttacacagctttgctataaatttatagatgcatctgtattattcagggctttccacagaacagaaacaataggagcgatataggttctccatatatacatacatacacatatctctctctctctgtatataaatacattcattataaggaattggctcatgtgattgtagaacttgacaagtcccaaaagtccaaagatttgcagggtgagttgttaaactgggacccaggagagctgatgggtcttaagttttactctaaaacttccctgcaggctcaagactgaggaagagctgatatttcagtttgagtccaaaagcaggaaaagactgatgtcccagcttgaaggtagtcagacagaaggaattctctctcattcagcctttttgttctgttcagtcttcaactgattggatgaagcccacatacattagggagggtgatctgctttactcactctaccaattcaaatgttaatctcacccacaaacattcttatagacacactcaaaagagtgtttggccaaatgtccaggcaccgtatggcccagtcaagttgacacattaaaattaaccatcacagcatccatggagagtataggaacatgtaaattacaattgaattcccatgcatatatatgggtattacttgatggatatgatcatgtttttagagctcagtgaaaaataaggcattagagaattgcaataaataataaaattatttattttgggtgcttttgtcaaagaggtatattaatctcttgatccctttcctctgcttcatctaactcgtaggggatatactttatattgctgtgcttggcatcagcaactgatgtgacagctcttcctctgttctatgaaaaggtgatgtactttaaaaaaaatgtttctgtagaaagtgcttatatccactcaataaaatctctaacaggtctagctactttaaaaggaacagttaggagagatgttttgcttgaatgatagtttaaagaattcctgtgttttttcccattagctccatctaacttgggttgtctcagagaaatccactggagctgatcttcctcagtaagatgtcttttggttttgttttatcatcattcctcatctgagaaccagagagagaaagctgtcaacaagttataggttcgtccagttggtggagctgtttgggccacagcacagggacatatcttttgggtggcaagttctaggtatggggctctttcatttgcaggtggcttatccaagagggctggagatgtagctcctaatattcttaatccagttaaccgggatgctaacatgttgtactgatgttacttctgtggcaaaacttctcagagatcttgggcccagtaactggtccaaaagaaagacttgagaggaagaatggctttacctgaagtctatggtcattcttattgctgttttttgtgcgttcaattcagactttcagcttggtcactgttcttctcttcttccccttcctctatgtggttggggactggaaaagggtgtcctagttgttcgagaccctatcctggactgctctttgctcctatctatccaacttctcaaagttcagctttgcttttcctttcctgccttgtactcacccctttgggctaatgagattctcagctttttccaaacgctgactcttctctcatctctaggtcctttgggtaaacatctcttccaaccttgatctaatttttaaaaaactgccccttatcactaattttagaagcagcaaactcattatatagtaatttagattaaaatatatatataattattgtattcctggattttgttctttttttcttgtttagttctgaattttgctcctctaggatattcttagtaaatctctaaggaaaatgcaaaatctgccactaataaaagcagccactgacatggatgggatctagggcgaaagcaaatggggaaaaatgggaaacttaaaaaataagagaaatgcctttttttttttttttaaagccagagacatgatcttgctgtgttgtccaggcatttcaaactcctgggctcaagcaatcctcctgcctcaacctctcaaaatgctgggattataggcatgaaatgcctatttttgaatggatacttttaaaattatctacttatctagtatgctcccagcatctgaagagcagataggattcattgatgaaagggtgaggtggttaaaacatacaggaggccaagactagtagttagccctgtgtaggtatcacaggattacttgggtcagagactcaagcagaagtctctttaaagcttttctaaatgataaacattgttggaatggggtaaagttgttctactgcaagaaaactcttcatcagaagaaattaagaattaattatccttatctaattagactaggtgtttctcaataacaagaaaaagtagttgctgcttgcattgcttttactctggcactagtataatgcagtcattattggtcataaagcactctaaaaccaattaatttgtaaagcttattttgacaagaagtaaatacaaaggtaaggcatagttagcataatgctgctatcatggcactcttgggcataatttatatacataaaaaatacaagggcaagtataactttcaagctgattgcctgtaaaagacttaattgaaaacagttttctgcttttaaaaagtgatttattttagatgtgctttaaaaaacaaaggtcttattgataaccattttgagtatattatctcgatgtgggatttaagtaaaaggtcaaatcttatagaagtatttttggtatgactcaattctgatcacagataaactttatcaagaaaatgaaattagttaaacattttcatgcctgagcactagtttaaagaggcagcaatttttttttttcacaaagacttcaagaagagaactttggttgagaaacctagaaaacaaagaactcaagatgttatcgtataaatgttctttaaacaagttaatattatgagaggggaaaagcattagatatgtttcactagaagaataaacaattcacatgtgtaatttttgcagtggatagacaaatctcagatcttttctgcctgatatcatttgcatttattcagcttattcaagtaaaagacttatattttatttcagaaaagctaacatggaacttttaattttacatttaagtcctgtttagttgtaattctcactcccccagcccctgtagcctcctgaacagctctgacttgctttttttctgaatccagcatcagtcctacaattagtccattggccaggtgatggtcatgtgcctggttagagtagggcaggctccatttgctgatgggctgtgcgactcaatgttcacaaatgtttagtcattcagctccttttcaaggaataagcctggatcaggcaagtaattaacctttgctagtcccaaggtttgttcattagaggcagggaaggaggaatcttctcacttttcttctcagtcctactgctcgccccagctttatgaaacatgagctatgtcctaagggaagagcaagtgggcctcaggtcctcagaaagcaccacaaaactcttaaaatattaagcgtaggagtctattgttcctttgttttcctggacagggaaacctctttaacattggacttcattgtctgtaccccatttcctgttcttacagtggctgttcagtcagcatgatggccggtgggacctggaggtccagcagcagctaagatgtccaggccctactcgtttgtacccctggtagcattctgccttagatatgagagacacttcccaggctcttcctgcatttccatcttatgctctggcaagcaaatgccaatcttggctcttttccacttaaaatagtccttctactttttatctgctgtgtaaattggggttagaaatattgacttaaactgcaccagactctgctgccagcttgcccattctccattacccaagtcttcctccctaacagaacccagagtttgttcatatattggcagcaatgtactcagcccgggcaatggatcttgactggtttcagccaatcagaatatcttctattaaggataaggatagcttccctgcagctaggggtggctgagtaaccttgttctgaccagtaagatttaagcagcagaagtccactgggaagaagggaatggggaaggaagactcctgggaaagcttttgtgctcttaataaaagagcagagaaactgctgtgctgcttgccccttcatcttggcttgaaaacaaatgtattgcctggagctgaggcagctattttctgaccatgaagtaataagccttattgtttgacatgtgaatgcaataaacctctacccacataagctacctccattgaaggattccatacttggcacagaatttctaactgacacacactaaaattcagatataaaaaaaaatagtttctgtaacgttttggtaactgatttcatctcttcctgaacctttgaggttgaaagtggtggcagcagaggtggcagtagccacttacctttatcattaatgataagttaatttattttggggaaatgactcagttgttcaattttccttccacttgcctcttcgagatgatatctgtggtaaatgggtgtgagctcttaagcagtagcatgatctactggctcacgcttgcttttcagagctgattgttaagtttaggggaattctgcaagtcacttgttatatgcaaccattattagataagttatataaacttacaatattaaaaagaaaggtagtactcaaaactcaccactttttaattatttaagtacattttactattattcttgcaattgaagttatttatgtctttttgtttgttttagagacagggtcttgctctgttacccaggttggaagcccaggccggagtgcagtggcacaatcatagctcactgcagcctcaaagctctgagctcaagtgatcttcccagctcagcctcccatgtaggtggaactatagacactagccaccacgcctggctaattaaaacaattttttttttagagactggggtcttactgtgttgcccagactggtcttgaactcctggcctcaagtgatcttccagactcagtctcccaaagtgctgagatgacagacctgagccaccacacccagcctatttgtgtctattgtatctgtaaatggaaatactatataatgccgcagttagcatgagagtacagatatctctttgacatactgatttcatttcctttggatgtatacccaggagtgggattgctggatcatatggtagttctatttttaattttttgaggagcctgcatactgttttcataatggctatgctaatttacatttccaccaacagtgtacaagggtttctttttctccacatccttgccaacatttcttgtctcttgtctttttgataaaagccattctaatgggtgtgaagtgatatctcattgtggttttgattttcatttctctgatgattagtgattttgagcattttttttcatgtagctgttggccatttgtaagtcttcttttgagaaatgtctattaagatattttgcccatttttaaatagaaaaatcctctacttttgacttttcccttaaccttcacctaaaacctctcaatttgagatttaggtccaaggcaaagaaaccatgttttcctgcttatgtctccatctttttaacgtcttcttacccatcaccatgagcttttcttttcccttctgtttggtagaaaatagttttaagttatttcattctccttcctgaggagttgctttttccctttctctgaggccatattggtgaaaaggctgcagagaacctgattcataggggagaatgaattaaaaatacattttaatgtatataaaaaactatcaccatcacgcttgtaactatgagtcaccttgtccacccttccactcctcactactccagggttccacagacctgagagtagggactgtggtgaagaatgactggcagatatacagcaactgaaaaggcaccacgcttttatctcagttgcattaccctttgtatatcagcacttaaaaagggatcttttaaataacatccttgaatccttttgggtggtagaagtaaaattggggctaagcaagaatgaaatggacttttagaagttaaaataggatgttgtatgggcaaatgtatgaggtaggaaaataatgttgtcactgctttgctatctccattttcaacagctctctcagtgcctctggcatctccttcttttgctatgtaccagccctgtcacctagtccctcccactattaatcattaatgacttaagatgttaccacctccttaattgtatttaaaagttaaaaaaaaacatgcttttattctttcccattacaaataacaattcatattccttttagaaaaatacagataaacataataaaagtcacttacaatccattgccttgaaacaactattactaccctagtatacatcttttattaaacattcttctacagattattattattattatggttatttttaataaccaaagacccaagagagggtcttgctctgctgcccaggcccgagtgcagtggcacaatgatagctcactactacattgaacccctgggctcaagccatcctcccattttagcctcctgagtagctgggactacgggcacatgccaccatgctgggctaattttttcttttttgcagggacagagcttcactatgttgaccaggctggtctagaacttctgggttcaagtgatcctcctgcctcggcctcccgaagttctgggattacaggcatgagccactgtgtccagtctacaaattacttcaaatggctgcagggcagaggtcacattcatccttatcaactgtaaatagcaatttatttgtggtcaaataataacttcaaaaccattagctaatattcagaatctattgacaaatgatggggaaaatctttttgtcagggaggtctttctggtgcacctcgaatcactccatgcctttgttgttgttttgcttgtcaaacctggaaatctttttcctctctttcacatctatcaaaatctttcctgtcttttaggtccaccaatgtttttacctgcccaacctcctttaaacttgcttctcatagtattcatcccttcccctgaatccttgatcacttgtactgctcatctagcactcatttgtacattttctcaaattgttgccaaactgtttaatgggtcatataagtgtttagggccaggaataactttggtgatcatccagtgtcttattctgttcctgctgctataataaaatattacacactgggtaatttataaagaatagaaatttatttctcatagttctggaggctggaaaatccaagatcaaagtaccagcagaatttggtgtctggtgagggcttgcaccttcttgctgcattctcacatggtggaaggggcaaagggaccaaactactcccttgagtctttttataagggcactaatcctatccttgaggcagagcccttatggcctaatcatattgtaaaggctgtacctcttaatattgttgcattgaggattaagtttcaacatgaattttagagtgacattgaactactacatggaactcctgggctcaagccttcctcccacatcaccctgctgagtagctgggactacaggcacattctaccatgccgggctaattttttttgggtctcactacgttggccaggctgctgtcaaacttctggggtcaaacaatcctcctacttggaggacacaaacatcagagggacacaaacattcaaaccatggcacccagcctatttaaaaatgagacccagagatcttgtgattacacaagattctgtagctaagattacatccctgttactctgactgtccccctgccggcccccaccaatccagctttcactatctcatattgcatctttctctacccaattagctagtaagccttaagcactagaagctattattagcatcatttctattttaaggatgaggaaactgaggtgcagataggtcaaataattcaacttaaggttaaacagtttgtaattggtggaaacaggactgtacccaggccactgactccaatgtccatgcttaatcctccttgtaccaccttacccatgtccatccatactgtagcttcagaaagattaagacctttggaggagaaataaagactgagtttgacaattaggaaattgttaacttttgccagggaattttcaacataggagtaggattgggagctaaattatgacaaattgagggatgaatggggaggtgaggcagtggagggcatgagtaccaaaaacaggtgggtactcatggaagggcagccatagggcggtggtttgatgagtatgtagaactgagggaaggcttgctttagtgattgattttttttggatgaagaagtctggagttcatgaaacatcctagaagaggaaggccaggatcaacatgctgatggattgactggccctggatagaagtggggtactttctttttgaacaagaagtggggaaggtaagtggaagtaaaacttgaaagggataaaaattgtggatgactgctttttttttcttggacattaggaagctgtgttgtcttgtgagggtcaaggggctagggttggggtagggaacttgagcaacatggaacaaatttggaaatgctgctgtaaggaaacacaatacaggaatatgcagggcagaactgaggtttgagctttaaaacgtaatttagataatcaacatagttttatgattttcttttccaacagtggcagaatattcagaattggagaaaacagagttgctgtggaatgtcaagggtgagcagaaggactgggcaagagggcaagagaatggagatgttgagagtgttgttgaagcgattgactaggataggctctgaattattgatgaccaagagttcagaacttgttacatataggtctatctcatatgcttttgcatttttgtctgtcatattctttgtctaatgacaaagaacatacatgcttacctatgctttcacattaaactacagaattctactttgtttccctcctcaactcctcctgcaagccttagtcttgaagagggaagggaggtctctactgaagggcacactttactgtcacaatcactcagtggcagtgggtgcatgttgatggatggtaaagggagtgagaattttttccagccacttgtggaaaccctagggtgttgagtcaccgtcttcaagatggagggagagagcatgtctttcagtggatgccagcagtgacatcacggtcagaatgcactcttgctggatcaaacagccctgagaggaagcatggggcctcatttttatgagaccaactgggaatagccatggttcttatcatgtgccacctgccatcagctgttttctctccacttggttccaaccaatctatcacacttattaaagttcagcacttatatcaccattatagcattgcttacaattttaggcctagaggattttactaatttaatcagtagcctgatgatcaaagggagggagttcattgcatgggcactgagccaaagaaacagtcttatgaggattttctcagcatttcctctggccacaggtatggaaggaagaacatcaggaaggattgataaatttggaataaaagcaagcattgagaggttggacatttgatgaggccaaggaagaggtttggtggaagaggtcaaggcaagagtgtatggtcagagaccgggagtttcagggtttatatttcagatgtgttctgaggctgtgctataaagagaggagagcatggacttgggagtctgagcagcaggtttagaatcctagcccctatctagtcattatctctgtgacactgggccatctctacctaggagtgctatagcctgactttacattatctgtgagggttacggaaaatgatgtgaatttactagcatggtgcctgccacttggcaagttctgatatatagtcatgactattgttattattgcagggtgtggcctcaggaatgggttaccaaagatgaagatggccatatggaaacagaggaaatgagattggctaagtcatcaacatgaatgttgaaattaccccattaactggcaagagtccaggaaacggcaaaccagatattaaggctctcaggcacactgtgggagaggatgggaaagtgatggtgttacaggatagcctgtagttcaaaagaagagactactgaggaaggcaagaacagcaatattttggaaaagacaatgaagagtgagagggatggccttgtgatggggcaggcctggaggaatgtgtggcctctatgtctctacatcactcaaaggtctatctactccaaactccaggaccgggccagttcagatgctcatcctgcctctcaaatgttttggtttttgtttttcttctctgctgcaggctcctgggatagagtctacttttctttccttttaacagttgccaatactccttcttgcccttaggtttctggtctcctcaaaattagctgtagagtgggacacatttacctggttacccttcacttttctttattgaccttgaagactagcaaataccattaactttttttttttttcttagagtcttgctctgttgcccaggctggagtgcagtggcatgatctcggctcactgcaacctccacctcccagattcaagtgattctcaagcctcagcttcccaagtagctgggactacaggctaatttttgtattttcagtagagacagggttttgtcatgttggccaggctggtcttgaactcccgacctcaagtgatccgctcatctcggcctcccaaagtgctgggattacaggtgtgagccaccgtgcccggccccattaacttaaaaaaaattgttgtaaaatatgcataacataaaatataccattttaaccctttgtaagcatacagttgagtggcatcaagtacattcacattattgggcaaccatccccaccatccatctccaacactcttttcatctcgtaaagctgaaactctgtacccattaaacactaacttcccattatctactttgccagcccctggcaaccactgttttactttgtctctatgattctgtatgatttctttctctatttaatttttgttttaaagatttaagagctatttactacaaacgagtgaacagagaggagagcaaaaagaacaagtgcagaaggcagcaatggtagccttgtgttgtaggagctcctcctttcttacttctctaggtgtttattgccaatacagtgatacagaatttcaggaaatgtagacttgtctgttattcagggacaggttggggatgtcttggctgccgcaggactgtatcgaccccgccacccctaactcttgcagtcaaaagatacccaggcctccagctctgatcccattcatcaggccagtctttgccagagatagaggaccctggatgatgacatgatgattctgttcttcctcaagggcctcctgccttgaaagtcttccttaggcagaacccacataggatcatgatggatttgggtggttgatgtacctgcttggtatagaaggatcaagggttatgactttatccaacatactcattatctaattccccacagatagatatatttctttgggagaaaacatgctcagatatacttctttgggagaagacatgctgtccctcttggctggagctggagctcccccatcccgtgcctctctttcttgctcacgcccaatccttctctcctctttccagccccctctttcaagctccctgtcctgctgacctatgctttctcttgggaaggactgtccccatcctctggagggacatcctgctgctgtatcccttcttatgtcttgcacacttgagctcatcaggctttctggcagctaatggaatacccttccttgggggatggggtgacctctgggccttaatgcttggaaggggcttgctggcctctggaggtgggaactccagtgccttctctcttgtggcctgggtgggcttgcttgagctggactctgaggagcactggcggcagctctcatgtcgtctctgaaaggctgagctagccctgtctggcagaggccttcacttcacagcactctgttctgtcttgtatctctaggatcagacttctgtgtgtgtgagagaaatgtttagagcttccctgtttgctgaggaataaaattgaaaatgattgcagctcagctctatattctgaaatcacagccaatctgatagagccatttttaaattcagacgctgcttttttaatagtcaggcactgacatattttaattctcccttaccgaagtgaaaaggcacaagcagattaagaatttatggtttaaacaacaaaataaaacaatgtgttggcagcattatactccctagaatttcacacatttaattttgttatttttactttcttgtatcaggcctgttaaatcctggaaggagagcagacatttgagaaattttttttcctgttctgtttggaattcatttcccttagtgtgacagttgagataagctatttggactgcctccagggagtgctccagaggtgggcagggaggaggcctcctggttccatgactaaggtatggctgcgttgggagctcggctcagccatccctagtgaaatacagtggaaagcggcagctggaatcagatccacaaggaatagcctgagttctccagaccaaagttatattttttaggtttgcctagctgtttaaaccaagtcacaggcagggctatggtagtcattcctaggtatcatcccagtgggacttgtgtacctgggatccgatggtgggactgctggctctggagggctagctggtcagaacttctgatgtctgctttgggcatcaagtgggaacatttcctgtatctcacatgggctggcagatgcttccatttaccactctgtatttttgctgaaataattatacctgacgtcacatacgaggcttccttgcctagaacagtggttagagcaggagcctgtgtagttgcctgcctgggcttagagactggttttactccctaattggcaaattacttagccctttggtggctctctttttccatttatgaaagagggataacagcagccactgtttaagcttgtaaggatgaaatgagttaatacttaaaaagtgccgagacattgaaaatgttcaataaagctgcaattaccacgacatcttaaaagcactcgagagacaaagctctggctaaaattgttatttctgtgttaggcaaaatgttgggacaggctaagcatgaccttgagtccttttggatgtgctgtcttgtgaccctcttcttggtggcatctctccctctccctccaacctggggtagtgacacttttcgtcctcctggaaagagctcccgtttgctgaggaataaaatggaaaactattgcagctcagctctatattctgatatcacagccaatctgatagagccatttttaagttcagacactcagatggccagcaccctgagatgcaaatttcccagggacacacattttaacaaggacaaaaggatgagtgaggttgaggaaagcatttaggggacagcctaatggcttcacaggtccctgactatgctttagatccctgagagtggggacagtcactcagagccatcaagtaacaccaaaatgcactttactgaagtcatttgccccataaattctgccaagtagagattctttggcttacaaactcctcgggcattatatacacttttgtgtaaattgcttgaggtattcagattgctttcttctgaaaatctagcaacgatcccattctgaaggcccaggagttttgtttgtggatcaaggagaaatgaagtggcagagggtgcattttgtttggaacatgtggttctctgggggaggctggcttggcttggatagggtgctggagtaggggctgtggctgagggcagcatgggggccttgtgtatctgagggcagaggagaggcaaagggaaatggagctggagtgcaaagggaggggaaggcctgtcaaaggcaacacatagtagagtgactgtctttgaacagcttcgtgtcagaccttagccctttcgcctaatagctctgcgagcaaattatttcatttcccagtgataggaatttttctattctgggtcctaaacaaatagctgcctgatgtggtggctcactcctgtaatcctagcattttgaaaggccaaagtggggagagctcttgaacccaggagtttgagactaacctgagcaacataatgagaccttgagtctacaaaaaaaaaaaaaaaaaaaaaaattgttgagcatgtgcctgtagtcccagctacttgtaaggctgaggtgtgtgatcacttgaacctgggaggcagaggttgcagtgagctgtgattgctccactgtactcaaatctgggcgacagagtgagacctgatctcaaagaaaaaaaataaaaataaataaataaataaataaataaatctgatgctacgatttgatttctgtggcttaacattttttgtcttcaaacagaccaggattttggaaagtgaattattttattttttcagtgtttcacacctttcttctttctgatgttaaagggggctaaagagatgcattggtttgctcaggctgccacaaagtaccaaactgggtggtttggaactacagaaatgtattgtcttacagttctggaggccagaagtctaaatcagagcattggcaggattgcttccttctgaggactgtgagggagaaatgtgttctgtgcctctcttcgtttctggtggttatcttctttctgtgtttcttcacatcatcttacttctatatgtgtatgtctctgtgtccaaattctccattttttataaggacaccagtcacactgggtcatactggccctctctactccaatatgacatcatcctaacttaactaattgcttctgcaatggccctatttccaaataaggtcacattctgactggaggttaggactttgacatatggatttttgggagacacaattcaaatcacaacagggaatttggaagaagtcagggtaatttgacactttttttttttctcagtcagaaaggggaggatcatctctgtgcatcagggcttatacaacaagaaccagttttctccagattctgttccttagttggaggccaaatcaacagatgtcatatgtttccatccttccccctaaggtgtctgttgcatatatagctgccatttgataatctcatcatctgcatgtattttgagaatgcagtggctatgataattctctgcgtgctaaggttttatctgatgatgactgcaagaattatttccccatgggtcagtccccttggggtagttgtataattacttgcctaattaatgtataaacataatttaacactgctaaatgtcagatgataggataaatatttggggctatctttactagcatctccattgtatggaccaatgtcgtagactatattgagtgaatctaacaccatccctggtgctccaaaagcagccatttcttctcacttgtacttttgacccaggggttcttgggctcattcacacacaaaattatacatttgaaagtagggcattaagcagactgcagagaaaggaagggcttttcagtttactcgtcgcttctagttggctaagggcatcttatttgagtaaatatgggtgtggtcattaggcttctgatttgaagaggatgcctggtgcccacaagaaacccaaaaaccctggaaaactaagtttagaatgctaagtttaagaagtcatgctgcagaaaagagtatggaagaatcactcaaaaatgtatctgattctatcttattatacacttcttaccaatgaaaaactccttctaatgagtggaacatcaaattttgaagagctttgggaatttatcctaaggagatgattggacaagtaaatatagatttatgtataaaagtgttcatttcagtatcttttatagtagccaaaccccagaaatcatttaaacacccagtggcaggggactgtttaaataaagtatgatggcatggccatctactggaatattacatggttattaaaatgatcctgtaaaatgtattgacattgacatatttataatattttgttaagtttacaaaatagctttataaataaatgaaacactttttactggatggaaatatggcaaaaaaatgacagtaattatcctagaagattgggttattaattaccctcttctttttcttttagagacagtgtctcgctctggcactcaagctggagtacagtggtgggatcatagctcacagcagcctcaaactcctgggcttaagtaatcctcccaactcagcctcccaagtagctgggactacaggtttgcactaccatgcccgactaatctgtgcattttttgtagaaacggggtctcactttgttgcccaggctggcgttgaacccctggcctcaagtgatcctcccaccttggtctcccaaagtggtgggattacaggcatgagccaccatgcctggccttaattaccttctattaaaaactattttgccatattttctgaatttttttgccataagcattttaataataaaaataacaatgaatgatatgaaaattgcctttggaatctcttgatggacacttgacatctggaagatttggttttcccaattccatagttcttgaacagttggccccattttagactctgacataataaacctccacacttttgatgaagaagcttacatttgataaagcttaaggatgaccttttgctaccaaaacagtttaatgcccattctacccagtcagccctgttcttccctaggttgctgactttgattaaattcatgggtctgagtccatctggatgagtccagagcagtctacctagttttcaaaaaagatcaatacctcaccatctgcttgtgagatttttgaagcatatggatcagctcagagcaccagcattccaggccctgcaagagcaaaccatcttgaattgtctgctcttcatcactttcatcaaaggttggctgagaaacgtgatatttatggaagatggtttagaatacatcctttccgctagacactacaagttctatgcttgaatcaagccaaactgacagaaatttccattcttggaatatgtgtctaagctgctcctgaaattaaatattcattggttgcattttagtaaaacaggaggtttattaaaaggccacaatggtgttatctcacagaactctctggaagaaagtccctaggcctcaaggagaccaggaagaggacccgaaggtcagaaggatgtctgtctccacctttagtttctgcttctccgtgtttcaaatttgttcagctctctctttgcagagccagccttctgagcatccctgatcctgtaaccacatgtccacaagtagaacaaacaaggtggctagggtaccctctttcccaagattggccagggtaggggagagaagcaggtgatggggggattgggaatggtgttcagagaaagagcatctattacattatagaactttgaaagaaaaaattgttgtcatatttttctcatttatcgggcatagactatgagataaaatcttattttatttacttttattttatttacttctatctactctgaccacccttggaggttatctatatttgtattacccggaatttcctttactagaagttcttgcctttgggataaccattattgtgctctagattttttattcaacaatttgttgagaaacagatatagaataccttttactaaatcttatttctgtaggaatggtgttgagagggctgtcagtgatatcgctgaatattctccaaaagtttcaaggacaaaattgctttaaaacattgaattaaatattaaattagaaagttcagcataattgatagtttcttttctctgtgattcagagacaaatattatgttcaaatgtagctgttatcctaggctcccttgttgcatataatttgtgtttttctttttcttggtctaaaattaccactcttacttatattttccctagtcctgatgctctcttcttattatattttatcaattattgcacatatttttattggaagtacctcaaatccttaggagggaggccagtcataaataaaggccaagttattaatatccaataagaatttaatctctgtctctctcatctacctattcatctatctgctttaagttggttttctaaattgctgcttcttgtaatctaatctagaggcgttagtaatgcagaaatgtcatatagggatagacacaggggagatgtaagggaactgtttttactgccctgcttctaacatgatatattaatagcaggtctttacaatacctgtccataagcttggtgatcagtgtatgtatttctgtgcatggtttttatgtgtaaaactgaattaacagataaaatgtctcatattgacagaagtctgtctatgtgataaaataaaatctacttgatgctcagtttgttaattcatatgatgccttttaaattactctattattttaatataaaactggaattttttactataaaactggaatatatgagtgtgtgtgtatctgtggcatatatacaagtaggttgtattctattaggctggtgcaaaagtaatcacagtttttgccattactaatatgtatatatcatatagatatgaaagtcagatgtaacacctgtcttcataatacctaaatataaaatctcatacccatcaataattctcaaatgctttaaaccgacattttataataaaattttcaaacttacagaaaagttggaacaatttgacagtgaacaacccagctggattatcatttagattctataattaacattttactatagtgtttcatcacatgtagatattcatctacctatccctctatccattcatcaacacatattatttttggaatatatttaaaagtaagttgcagattcatccttagacacttcagcatgcatatctctaactagatttaaataaatattttccatggttttttccctttgatgtcaaatctacatacactgaaatgcacatatcttaaaggtaccactgaaagaggtttgataaatgaatacagctgtgtaacccaaaccactattaaggtatagaacatatacattaccatcattccagaaagttccttcatgttcctccctagtcaacccccatcccctcacccccaaagctgttgatcatattttttcctatcatgtattagttttgcctgttctgaaacttacaacttgaatcatacaattgcttttgagaactaaaaggagtgttttctttttattgttaacactatttaaatttctgggatgatgaaacgtggcctcagtgtcctaaggtatatagaattatagattattataagtggggtgttatccagggcagagcagtagcttacccttgggtctcgttgacagagatggggtttcaccatgttggccaggctggtcttgaactcctgacgtcaaccaatctgcctgtctcggcctcccaaagtgctgggattacaggcgtgagcctccgcgcccagcctggatatggtgatatgattttttgtcagtcacagcctctggtgaggacagttggctaatttaaaaaatgcttggcacacacatgagcattgtatcctgctgacagccttccacagattcgtccttttgtctaacttagagttctcttggtgaagagatagcttgaagtatgttcttaggcaagtcacttccatgacatgttctcctttgtggagtgaaaaagtgaaaggcgtttggatgagaatctggtgagcaatcaaaaacacacaagtttataggcttcaggccaacatattttagtcagctgaaatcagggagacactgcctggttggctggctgcctccggaccggggcatcctgcagaggggccttcagctaggggaggggcagggaagaaaatctcaggaaagggtgggcagtccacttttgaccactccaccttatgcaattctttcttttcccttcttctcccttcactttctctgtcctcttgacctttcatttcctttcttttctgtcttccccgtggcagctgtgaacatgtggatcccttgtgcctgaggttctgctggtagctcctgcagcccgccagactccaggctcaaggcttaggggtgtttcttcccacagtcttctggagagtgtaccaacaatttctccacgctccctggggttgctcagctcagcagggctggggaagtgagagctgctaaccggctgtgtctgtgagtcagcatttctccccaccgactcaggtctggggagagaccctgggagaggatgtggaggaggcactttcctttcccagactggagatcaggcgtccccaggggcagggggctgggggtagaaggtcgaggagtgaggagttgtggagagtgagtggtgtctggagcataactgttgtatgtattcatgcatgcgcgtgtacacatcactgaatttgtttgtggtgactagagtcagttctaaaatgtgttcttgtaaagtcttaggctcctaaaaaaatcatttgaatatggattttaaatattctcagaagtttgagaaaatattcctactaactatgacagggaacaaatacatacaaattagttaataacatcatgctaaaacgtataatgtgattttcaaaacatgctaaagagttaaaaagtctttttaaaatttgtttattttttatttctcttccctcttagagcgtaaaaagttttaagagggttttttgttttttcttgatatttaaaattttggtttgatgctgagaaaagctttccacatactaggcacgtaatagatattcagtattatgtgatcacaggaagtaaaataagttagagagatcagagagattattctgtatttaaaggattgagattttctactatttttagccaaagaacaatatgcaaccttgagttaaaagattccttattactgattgggagtttgactgttttgcaaaaactgtgcttgccacatattgtcagatgatgatgaaaaatctaagtttaggcttgacatatagtgaattatgtggcttttccccaacttgaataaacatacttaaaaaaaatcccactggtttatttgtcttcatgtagcttgcttacctcacaaggtttatttcagtagtcatttaaaaccaaatttctgaattcttacattgtatagaaatatcccaggaaccatttttgggttgaacaagacttttatattagttccccagtcataacaatattttcttgaagttacagtaatatattcttgaaggcataataatacattcttgaatatattattgaaattcaacttatatgagaatatgttaagaatgtatgagaatatattaaagaatatattgaatggtggtattacttatatattatttatcaccatttctggatatagtgatatgcttttttttttttgagacagggtctcactctgtcacccaagctggaatgcagtggcaggatcgcggctcactgcaacctcggcctcctgggttcaagcaattctcatgcctcagcctctcaagtaactgggactacaggtgtgcaccaccgcacttggctaatttttgtattttttgtagagacagggtttcaccatgttggtcaggcttgtcttgaactcctgacctcaagcagtctgcccatcttggcctcccaaagtgctgggattacaggcgtgagccaccatgcccagcctggatatggtgatatgatgtttagttagccacagcctctggtgaggacagttgactaatttaaaaatgcttggcacacacatgagcattgtatcctgctgagagtcttccacagatttgtcctttggtctaacttatatttctctaggtgaagtttacactcatttctttttgttctacccttatcggtgactaagagaccagctgtattccaacttctgaatactggcagaattctgaatcagtagctcttccaaaagggcctagcttacctcagagaatcagtctgacccttgtgtccttgtctcctctatggagaacatggagttgcttttctttgcagttggttgtagcttaaaccatagtgcattgctgagtcgtgtgatgtgtgattcatcaggcctcaggtgacaacggtggatttccttcaggaatgagtagcaaacattttggcccctctttgggtgccaagcaccatgaggtaagggagtactttacagacccctagagatccacgggtgctctagatatagccatatttcagcccctggatcctttgttagtgccatattaggagaatgcctgtggaaatggcttcttttctccacataaggcttttctttttctatttttaaaaatttggaccaccaggcaagaacacatcaggaatttttctgtttaatttgaacacatgtgttaagaggcagagtatagaaagtagtctgagactagagaatctaatggagtaactaagagggtttacacctaggatattggaattagctatgtcctaggctataaatctaaggtatctttgttctaaaatgaaacatgacacagacatgacagatgacaaagagtacactttattgtagatccatataatactgagaaaattatttttctgcaaatctccttggagatcaggatggggttgaacctcacctgaaccttaagtcatggaaagtgaaggagaattttaggatggcatacagtacaatgatctttaaaatgaactgcagggccaggcgcggtggctcatgcctgtaatcccattactttgggaggttgaggcgggcagatcacgaggtcaagagatcgagaccatcctggccaatatggtgaaaccctgtctctattaaaaatacaaaaattagctgggcgtggtggcacgcgcctgtagtcccagctactcaggagtctgaggcaggagaatcgcttgatcccaggaggcggaggttgtagtgaaccaagatcgtgccactgcaccccagcgtgggtgacagagcaagactccgtctcaaaaaaaaaaaaaaaaaaagagagagagagaaagaaaatgaactgtagaacactgatgttcttctggcaagaccaagttgttttgccactaaaatattggaaaaataagtgtcttttcttgattttaagaaaaacactttcccagaattatgtatgcttttctcccaatactttttaaagctttggtgtttgtttctgtactagaatctagtgtaagaaagatctgactgagggcacatgttctcaggatctcctgagggctgtgtcacaggcaaaaacgtggaataaaataaaataaaatatccaattaagcataacacattaactttaaaaaaacctaagtgtagcagtatttaatagtgttttgcaaagatgctgttactttcatgacacctaccacctgaagaagtttgagaaggaccaggttctaattgtgcaactgccattaactagctagctgtccttggataagcctagaaaagctgcgtaaaggaggaaggatttgaattggaccctgaaagaaagtcagatcttagaaaagcagagaggggagggggaagttatttctaatgagagaagaggagggtaaggagatcaaagacctaagaagtataaagtttatgtgggtaatagagagaacatctgcttgccatgaatttctcttgagtttttttggccccagtgtagaactagtgtctctgttctctgctgtgacctcacctggaaatgtctattagtttatcatgccatgctggattaaagaaaaaccacagagagaggagttcagagatttatgtattatataatacatcataattatttttatttaaataattatttttatgaattaataaattagaaaagaatcatttgtattatttacgtgtatatcttccacctgaagtatgtttggcaatacattctctcagctttcttttgtctgaatctgtctttatttttgaaggagttttaaaattggatatagaattagacatagaattttaggttatagctttttttgcattgtttttgtgagaaatcagtggtacttcaagttattgctttcctatctgtaatatatcccttttctctggctgctttaaagattttcccattatcatttgttttcaacaacttgattataatgtgtcttggtgtttgagtctgtgtatttattttacttgtgatacattgagcttcttagagctaaggtcttgcagcaatccagggagcatttattcaagaaaaatggctgatttttggtaaaaaatacagagctttgtggtgctttaacttgtcctattacaatcccctccttctccaactccatagtagccttgaaaatcaacagcccataaatcacgatgaaaaccagcaggctggtagccacatgagagggaagaatagggttggagttccttcaaatccccattcctagagacttttattatttgacttgtctgattgttctctggaacatcccacttatggggctgtctttatttgacccgactcagaggtcatctaatgtgaacaggcttttccttaggggtgtttgttcaaaatgatgagaagcaaatgttgaaatttcaactgcctgaagcactgaataatagttgtggcaaacagtaggctaaccaaaaggcttaaaagaaaatgctggggaatgatatgttcataggggtctttggaaggctccagcatattcctcagaacctaaaaggtcacatgcacgtgtggggttgtttacaagcctagagcccatactcaggaaaggcctcaaaggtcccacctttggctttttgcttttatggctaatcaacaggttctgcacaagcaggaagtgaaggctaaggcagagttataaatggcctgttttagcattgcctgttgaaagcatgcctagacatgcagagttcttcagcaaagactggtaaactcattgattccagacatctaaggaagtctgtgtctaatcattagctgaccactattgtaactgagcagagatttcagtggcaaaacattacaaaatatacagactacagaattagttcaaaaaagtcactaaaccactaccaatactaccaccagcaaacagtaacaagcagaaaccacagggaaggaggggaatttgtattccaggctttccttattatattagttaaaatatatagttttcaacagaaaattatgagataaacaaataacaaagtatcagggaaaaaaagcagaccacagaaactgttcccaaagaagtttggactttctgaaaaaagactaaaaattagctattttaaatatatttcaggaactaaaggaatatatgagaacaatatctcaccaagtagagaatattaaagaaagatagaaatgataaaaggggcaaatagaaattattgagttgaaatttttaataattgaaataaaaaattcacttcagaagcaaagttgagtaagcagaaggcagaatgagcaaacttgaagataagtcaattgagattcagtctgagaagcagaaagcaaaaagaatggtgaaaaatgaaaaaactcagagacttatgggacatcatcaaaagtgccaacatatacataatgggagtctcagttcaggagagagttagagaagagaagaaaaaatattttaagaaataatggccccaaacctcccaaatttgaggaaaaatattaatctacatatccccaaagctcagtgaactccacataagataaatacctaaaaaaaaccccagatcataatctagggttgacagatcattatcatactatcaaaagccaaagataaagagaatctggaaagtagcaagagagaagtgactcatcatttacaagggactttcaataaaatcaacagctgatttctcattggaaaccctggatcccagaaggcactgagatgatatgtttaaattgttgaaagacagactgtcaaacaagaataaacaactatccttgaaagatggaggtgaaattaagacattcccagataaagaaaaacagaatttgttactatcagacctttcctataagaaatactacagggactccttcaggctgaaatgaaaggacaccagacagtaactaaaattcatatgaagaaataaagagcaccaccagtaaaggtaacaatataagtaaatataaatgtttaaatgtagtttttatttataacttttttctaacagatttaagcaataattgcataaagcaatgattatataactgtgttgatgggcataaaatatataaagaggtaatttgcatgacaacagcacaatagtgaaggggaaaatggtgttaaataagagcaatgtttttatatgctgttgaaattaagttgatattaatctaaactatattgttataagttaaggtattgtaatttgcagggcaacaactaaacaattaagttaaaaaatagtcaaagaagaacagagaattaaaatgctgtgttagaaaatattatttagcaagaaaaggtagtaatggaggaatagaggaacaaaaaagacctaacatatgtatatagaaaacaaataactaaattttaccttatcagtaaatacattaaatataaacagatagaacattccaattaaagacagatattgggaggcaaaaaaatcatgattaaactatatggcatctgcaagagacatactttagatttaaaaccacaaaaaggttcaaagttaaagggtggagaaagacataccacacaaattgtaaacaaaagagctggagtggctttgctactatgagacaaagtagattgtaagacaaaaattgctaccaggtacaaaaaagggtattttatattgattaaaaaggtcagtatatccagaagacataagaatgttacatagccacagagccccaaaatacatgaagcaaaacctgacagaattaaaggaagaattagaaaaatctaacaatatatagtcagagactttaatactgtactatcaataatagatagaacaactagacacaagatcaacaatgacagaattgagcaacgctataaaccaagtagatgtaacagacatctatagagcactccaccccaaaagagcataacatactttcttctcaaaatgcacatggaacatggagcatatgtcaagccatatagcatctcaataagtttaaaaggattgaaatcatacaaagcatgttctctgaccacaatggaatgcaattataaattagtaacaaaaagacatttgtgaaactcacaaatatgtggaaattaaacaacacactgataaatatctaaaaggtaaaagaagcagttacaaaggacataagaaaatgctttgagatgaatgaaaacaaagacacaacataccagaatttatgtgctgcaacaaaaacagtgcttaaagggaaatttacagctataaattcctgtattaaaaaagaagaaaaaatcttaacctaattggaataacctaattccttaagaaactagaaaaagaaaagcaaactgaacccaaaacaaacaaaagaaaggaattaataaagattacagtggaaataatggaaacagaggccagaaaaacaatagagaaaattagcaaaaccaaaagttagttctctgaaagatcaacaaaattaatgaacttttgtctagattgaccaagaagaggagagagaagactcaaattactgcactcaggaatgaaaggcaagacattactaccaaccttatagaaataaaaaggaatatacaggaacactatgaataattgtatgtcaacaagctagataacctagataaattggacaaattcttaggcacaatctactgaaatagactcaagaaatagaaaatatgagtagatctataacaaagaaagagtttgggtaaataatcagaaaacttcccacaaagaaaagcctaggcctgcgtggcttcatcagtaaattttaccatatgtttaaagaacaccaattcttcacaaacatttccagaaaaaccccacttatccactcattctaataccaaaactggacaaagacattacaaaaaaagaaaactatagaccagtaattcctatgagtataaatgcaaacatcctcaacaaaacacaagcaaaccaaatccagaagcatataaaaaggtttatatactcattagtaggtgagatgtattctaggaatgcaaggctggttcaacatgttgaaatcaatcaatcaatatatgtgtcattaatagaataaagttaaaaaattttatgatcatttcaatagatgcaggaaaagcatttgacaaaatccagtaccctttcataataaaaacattcaacaaactaggaacagaaggggacttcctcaaactgataaagaacatctacaaaaagcccaaaactaacattatacttaatacttatactcaataatgatagattgaaaacttccctcctaagattaggatcaaacaaggatatccactttcactgcttttatttgacattgtcctggaagttctagccagagtacttaggcaagaaaaagaaattggcattcacattgggaggaaagaattaaaatgatctctctttgtagacagcatgatcttatatctaataaaaattattagagcaaataaaacagttcagcaaatttacaggacacaagatggatatgcaaaaatcaattgtacagttgactcttcaacaatataggtttgaactgtgtgttcacttatatgattttcttctacctctgccatccctgagatagcaagaccaacacctcctttttctctcctcctcagcttactcaacatgcagacaataaagacttttaagataatctactttcacttaatgaataataaatatattttctcttgtgattttcttttttattcttttcttcttatttttagagacagggtcttgctctgtcacctaggctggagtgcagtggtggaatcatggctcactgcaaccttgagattctgggctcaagtgatcctcccaacctcagcctccccgatagctgggactacaggggcctgccaccatgcctggccagttttttatatttttttgtagagacagggtttcaccatttttcccagggtggtctggaactcctgggctcaagtaatctgcttgccttgtcctcccaaagtgctgggattacaggtgtgtgccaccacacctggctaagttttcttttttcttttttgtacagacagggtcttgcaatgttgcccaggctagtcttgaactccttcaacagcaggctattagtagtagttaagtttttggggagtcaaaagttacatgcagatttttgactgtgaaagggggtcagtactccaattcctagttgttcaaaggtcaattgtatttttatacactatcaataaatcattcaaaataatttaataaagcaattccttttttatgtttttgacagggtctacctctgttgctcaggctggaatgcagtggcacgatcttggctcactgcaaacctctgcctcccaggttcaagcaatcctcctgcctcagccttaggagtagctgggaatacaggtgcacacgaccctgactgactaatttttaaatgtttttgtagagacgaggtgtcactatattgcccaggttggaaaggaattccatttaaaagaggataaaaaaggataaaatacttaggaataaatttcacaaaggaagtacaagacttttatctttaaaagtacaaaacgttgtaatgaattaaagaacacctaaataaatggagcaatatttcaggtttatggattggaagacttaacattgttacattgttaagatggtcattctctcctattttatctacagttttagtgttatccttaaaagttcagtggtttttttcccccagatattaacaagctgatcctaaaatttatatggaaatgcaagggatttagagtagccaaaacaagattgacaaagtaaaacaaagataattcacacttcccaattttgaaatttaatacacagctgcagtaatcaagattatgtggtataagcatacatacagagatcaatggaatagaactgagagtccagaaatgaactcagacatttatggtcaattgatttttgacaagggtgccaagacaattcactggagatagaatagtattttcaacaaatggtgcaggaataacttgctattgatatgcaaaagaatgaagttagatccttaccttgtacaatatgtgaaaaataactaaaaatagatatcaaaaacctaactatgagagctaaaaatataattctcatagaaaaaaataggtttaaatttttgtgactttggattaggtaatggtttcagatatgacagccaaagtataagcagagaaaatatagataaactgaacttaatcaaaagttaaaacttttgaatttcaaaggacactatcaagaaggtgaaaataaactcacacaattggaaaaacgtttgcaaatgttttcacatctgataaagctgtagccagaatatgaaaaactgttacaacttaacaatgaaaagacaacccaattttaaaaatggacaatacatttgaatagacattcttcaaagaagtatatgaatgaccaataagcacatgaaaagatgctggacatcattagatactgggaaaatgcgattcaagactgcaatgtgatattgcctaatacctaccagaataggtaaaatagaaaagacaaacattagcaagtattgataaggatgtgtagaagttggaactctcatacattgctggtgggaatgaaaatgttgcatttactttggagaacagtttggtagttcctcaaaaacttaaacacagagttgctatacaactcaacaattccacttctacatatatacccaagagaactgaaaatatatgtccacacaaaagcttgtacaccaatgtcgatagcagcactatttattatagccaaaaagtaaaaacaaccgtatgtccatcaagtgatgactaaagtgttgtatatccatatgatggaatattatgcagccataaaaaggaattaagtcctcatatctgctacaacatgggtgaaccttgaatacattatgctaagtgaaaaaagtcagacacatgtcatatgatgccatttatctgaaaagttcagaataggcacatctataaagatagaaagcagattaatggttgataggggctgggcaatagggatatagtgagtgactgctaatgggtatcgggttttatttggatatgatgagagtattttggaattagatagtggtgacagttgtacaactatataaatgtattaaaaactactgcattgtatactttaaagggtcagttttatgacatgtgagttatatctcaatttttaaacaaccaattgagagacagtatacaaaatacctgatcattaatactcaaaactgttaaggtcatcaaaaccaaagaaaacctgagaacctgtcacaaccaagaacagccaaaggaaatgacaaaaaaatgaaatgtggtatcctggatgggatcccgggttagaaaaaggacattagtgataactgaggaattttgggtaaagtctctactttcgttgataataatgcatcaatattggctcattaatggtgacaaataaaccatactaaggggaagctcatgtaagagaactgtgtactaccatcacaatcatctaagtgttctaaaataaaaagattgcttagaaaaaaggctggccaggcgcggtggtttgcacctgtaatcccagcactttgggaggacgaggcggaggaccacttgaggtcaggagtttgagatcagcctgaccaatgtggtgaaacaccatctctactaaaaatacaaaaaaattagccaggcaaagtagcaggttcctgtaatcccagctacttgggaggctgaggcagcagaatggcttgaggtgggaggtgaaggttgcagtgaattgagatcacaccactacactccagcctgggcaacagagttatccccgtttaaaaaaaataaatgacagaggaaaaatataactaagagcctattgtattattcgacatgaactcctcgagataaatacaatcttgaagctccttctaactttagaaacctgtgatttcttgcatagtttggctagttgagttttgtactgtaagttccaccggtcagcttctcagccagacttgggtaatttatgtccagggtgacaggaagcactgaggaaagagcgttctcatcagtggtgatgtaataatatgtacaccaaaccctcatgacacatgtttatctatgtcacaaaccttcacatgtacccctaaacctaaaattaaaattagaaaaaaaagagtctctttctcagacccttccaaaccaacatgtgtgaaacatagtgagttgtccttttaaacttttatcatatcatgtaaaggtgatgtactccacaagtggcaggtatttactgagtgcctgtcatgtcaggcatctgggagagactagggtgaagccaggcacaaaaccacacattcaacagtgaattgcatgcatgatgtattaccattattatagtgagtatgatgaagaacaggatgttttgagagcatataacaggatctcacctgagttggcaattggggaaggtttctgaggcagggcagtgaagccaagaggaaggacctgtaggagaacctttggtgaagaggagggatgggcttttccagcagggggaatggcattgggatgttcccatgtctgaaggggacaaggagttgggaggaactgacaaaagaccactgaggcctgaggtgtggaggcaggtgctgcatgggcagttggagagggaagatgtgagattactctgagaagtagaaagggagctaggaaggcattgaaaacttttaagcatggcggtgtctgggctagatatgtattaaaaacaatactctgggccaggtgcggtggctcacacctgtaatcccagcactttaggaggctgaggcaggaggattgtttgagccctggagtttgagaccagcttgagcataacagagagaccctgtggtgtgcacctgtagtcccagccactcgggatgctgggaagatcctttgtgaccaggagttgaaggctgcagtgagctgtgaccatgctcctacatacagtgagtatgactgtactcctgggtgacaaaataagaccccatctcaaaataaacaaatgatactctaaatgcaacatatggaatggattttgggagcagtggtggagtgggagaccagttacaaggctaactgaatagccttttaaccagttaaaaggctaacaaataccaaaggcaaaaagtgatggggtggtggtgggggacagaagttgagttgagaacaaaattaagaggtggaattaacaaaaaagtttatggaggataaagaatataatttatagatgctgataaatacagaggtagctgtactaaaaaaaaaacctaaagtatttgttaaaaaacaaaagacaaaaccaccaactaaaacaaccaactaatcaacctaagattaaattaaaaccaagacccaggtctggaaaaaaaaaaaaagatcagctttaacaagtgaatacatggtatttttaaaaacacgattattccttcaaaatagtgcctacagtgtctttcaaaaagttgcctttctctttttcaaatcgtgtaagatgtgtcatataagatttgggtgttttccctttgccgatggttggagagtggtgatgtgtcttgcgaaattaaaccacagagaacgtcgatttgaaactttcggagtttcggagaaactggccctagctcagctgccagtgaccagtgagatggattcagaatgttgtcctagtgagggtgctcagtgacaacgcaggtcagaggcagggccggctgcgactccacagacagactcacagccacagcgtctacaatacacacagctgctgcctggctgcgtgacaaaggtgtcttggcagaagcattttggctgtctgaaatacagcctttgcacaatcctgagactatattttacaagttcattttctaacatccaggcacgcttttatggcatctggagcattttgctgaatgacttggtagtgcactgctgaccagacagcacatttccagatttagattataagagaaaaacagcaagtggtaagttcagctgcaggtcaatggatacttatactacagttccctcactgagcactgggctactttatcccatggggaccaatcctgtaaagtgtattcaacagagatggccctaggtgtttgcttttatggttgttagccacattcacactgggaatgtgctgttatcacattgtaaacattattcttaatatcagaaagaaaactggggagagtgtcaagaattggcatgcacaaactgatagaattgccagtggacgttcttattttctgagcatttatgagctgcaggaggtaggtgcagtctgtaaaacaaaggtggtgagaaacattaaccattttttattgattttatttcaaactgtgtacatcttacacgttttaggttctttgtaatgttgggataatttggaggggacataatgatgttcactgacaaatagctttctgaaaaagtcaggagttcatacattatcctgcattgatgaaagactttcagcctttcaaagcattattagacttactacttaaaatttttgcccagcttgttcaattttactcttaagaagaagggagggttaaaaaaatagtagtattaaatatatgaaatcttaattttaaatgatggctgtcatcaagtgtgccctcaatgagaacaaacatttttatacatttgtactagagatgcccagtattgcttgctcaccctcagtccctgttgtctttaataatcgtgttatatacaacacaatttcaccctgtctgttccttcagcctacccctgttccataccttccccagctattagacttgggtggtcccttgacttcacatccagaaatgtctacagctcagactgaccagttaccaggttctgtgtgcactggcctacacagatattatgagtccttcagaatcagaagatgggaaactgaagcctatgccagccaaccaaaaaggtcataggtagactgatagctaaggcagccattttggtcatgtgcaaggtatcagttggtaaagggaaaaaaatgaaactcacatgtagagagagatgtgattaaagaaagaaaagaagtaagtaactgcctgggatcctgatagtttctgagccagacctaggccatttatctttaaaataaatcgactttttccttgaggtaacctgaatgaggctcaatctttacagccaaagaaaaattatccttatcagtgatgtctgcctggtggctggtgaatggtaaaaactggcaggagagaccaatccgatgggaaatcaagttcaggtaggaaatttggttttaaaccatagagaatatttaagattgctacttccttattcagacctggtcactgtggagcaatcatcattactcccatttatccaaggcatagctgtacataagttttgtctcaccttgggtgagatttccttaaaataaaatactataatcataatggcttacttatgctttggctttcataaaacaaaacaacaactatgcaaaacctacctgtgtcctctgtggttggattgaaaaaaaagggggtaggttgtgaaattaagctgaggacgtgaccatgtgtctgatgactaagatggaacccatgtaggagttgagtcagtaataacatgcctcttgctgcagctcaagttgcctgcaaacccccacgctttttagcaaatattattttgaatgtcagagtgcacagagccgttctctagggttgggctaaatttgactctgtgggagaataaacctagaattccaaatgtggtgatcccaacagagtatgtgatgcaagaccaattttccacttgtgccgggtgggtttgttcaaatctcacacagaaatgagagatgccagacggggtgttgacttgccccaaacataaggtagtaatttaggttttattttaaataagaattagagtctgggtaatccaaaattttaatttagaaaggagcctgggagaatggcagaagacaagagctaggcagccctgtgaagaagggttaggagtggagcgatgaggcctcgtgtgcttcagtccagttctggaagagctgatttgtagtaaaaaagaggcaactctaaatctgtgtcttagcatggttttgtagaaaagcctaaaggtgattctgggtgctgtgatttgaggtagtagtttctttctttaatgtgcagataatagagtaaactttaatgattaaagcattataagctgactgcagtgtttaaacactgacccagtttcagcagtgacctaataagggtggcctgggagaagggggggctcaggggcagcttggaagaaataggtcaaaaggatttctcccagttcttctcaggcagacacaatgggacttggcattctttgtgcaaagcctggcggttgcatgaagaattttctcctgaaatgctcctctatgcaatttactcttggttcaagtcgatgcttgtgatgctgggtcattcttttggtttgaggaggatgtagtgtattcattcaacaaatatttattgagcacctactatatctgaggtaccatgtggatggctaagaatacagtagtgaataaaacagtgtctgttctcatggagcttactttctagtggagaaaagcctgagttcaaatcctgactcaatcagttatcagcttggtgagttacttaaccttgggtaagttaacctgtctgtccctttggtttccatatctgtaaaatgggatgacaaaattgtacttaccccgtaagactgtcatgaggattaaattgaggccacacatgtaaagagcttacaacaatgaatgctttgtagcaaggacttcatataaacaattacatgtcaaagtgagtgaatgagctttagttgtccaaagatggaagaacaatgaaaacattcatatggaattctcatgggtctggaataagcatttaagcaaggccttctactgaatatggctatcaggtgtggagttcaaaatgtgtgaaaaaccaagagacccagaaaccctcatttaagcaaacagcctttgaaacagaagcctgactttagctatcacattcatattcttatgccaagagagatcctgcatagaattagtaggtaatattaaaactttggtttcttttagggagggagatgttacccttgtcccagtggaagacttgtcatgtgaatttgctggtagcctccctggggttgtgagacattgacaccacattatactttgcatggggaagagtgatttgctaactcagtttttatatgatatcctgagaaatctgtgatttctcatcctgctgtcaacgtgcattagactgttggagctgaactgtcactccaccacctttcagctcaatttctttatctgtaaaacaaaagaagctgaaagagtgaccttcggttaaagccataggaccctaggaaccagtccttcataaatttatgtccacatagctgagatacctgcaatattgcatcccagatatcaaagcacacatatctcactttaagttgatgcttactcatacctggagtagatgctgatgggtgttggttctgttatgtctatagacatgatgctctttaaatagaaaggcatttgttcatcccagatgcttcagtttgtatggtcttctcccttgagatttccaaatatggttctggaggaaatgggtacatattctttctttttggagcaaaggctttttggaacaagggccatgttgctgatgaaaatgttatattgggtctcatggcaattcctttattgctttcttgaccctgtgtcattcagggagtgtcaaaaaccacatggtgcttctgagacctacaatttttgcatttagttctctgatttagctgacagatgttaaaacacagatatagccagataactccccagtgacaacacagatgcaaaaactgaaaagtgcagttactccagcttggggagggattatattggatattcaaaattttccctactgaagcccttacatttttcatgtgtttctgttaggctaatgtggcttaggttagaggaaactgagtctctttccttctggttgattcaatcattcatatcctcaagaaaatgtgccaatctggagctcaggagatcctgagaatattaacaataacagcaggctcaagtctcttttatggctggcagggctctgacagaacaactttgggtctgaagagaaataaaacaaaaaagatctgagatctggagggaaatttcattgggacttacccagtcattttatggattaggaaatacgaggcctacagtgactttctcggggtcacagataggagtaacagaaccagggctagatctaggtctcctaacttgcaattgagtctttccccattggttcctggcctctcgtgtgtcccctgcatctccctgaggtttacccttgagattggtgttggggactgtgacacatggtggaggctgcagtagggcctctggctctctccagtcttgggcgtgcctcatctcagcccattgcctttggggaaatgctagccacaaacatagtgagttaaattcttggactatcagatatagctcagactttcaagatgataaataaagaaactgaggttcaaagagggaatgtgactcgctcagcaattcagaaaatcaattaacaaataattatggagcacttaggatgtgccgggcctgtggaaactgctggtgggtgggtgggtaggtgggggcggggggcggcatttgactaagaataagacagacaggttcttaccctggaagaatttaccatccaggaacaagagagcaaacagccacaagtgggaggaatatttagaagcgaggagtccccttggagaacttgacctggtctgacaatcaggagcagactcgaatcttctgttccctctgtcgagatgcctcgtctctctaggtcttgctgacttgaatgtgtgtggagagttcaaagccaggaaaggatatgtttgaggtaacctgctttcctaccctatttagattttaggttaattttaaaaatgtttcccttttgtataagattattttgatgcttttagaccctatcattaccctattatttattacactgaagaatctatttaaatattggcctcactacaggccaccctcaaagtgggccagttcttagggctcataggggaactatgacccagtgtacccctacagaaaagccactgtctccatggcttctggttgcctctagatagaaatctaaaagcccactgatgagtttgtgacatttagcaattgccaacctttgcctagactaccatcatgtgtcctgggaagatgcccccttcctgatccacagacctcttttctccatgttgtatttctcgggatttggaacttttctagatgacagttgtttttcttgctcaaagggagggtagcatgcctttctctgagccatgttcccccgcccccttccacttagagcctgcctctttctgaccagctccacctgcccctgcagcagccctactgccctatgtaccagctgcaactggttttgtgtatgattatgtatttaaaacaatttgtgttcctgtctcttttcattatgtccatcctctctactcctctggattacaagtgtcgtgagaaggggggttgaggctcctatttcctgtagggcttagattactgaggcgcagttggctggcggctgggcagactgaaccctgctgttcaaaggcagatgggagagccggggcgggggatctgagccaccagcccagtggtccagagcagttgtctgaggcaggacaccaggctgcaacactaatttgccatgtgactctattttattttattttatttttgagacagggtcttgctctgtcacctaggctggagtgcagtggcgtgatctcaactcactgcaacctccacctcctgggttcaagcaattctcctgcctcagcttcctaagtagctaggattacaggcatgcgccaacgcgaccagctaatttttgtatttctagtagaaacggggtttcactatgttggccaggctggttttgaactcctgatctcaagcaatctgcctgcctcagcctcccaaagtgctgggattacaggcgcaagccagagcgcccagccgccatgtgactttagactggatttcagtttccttgtctaagtgtctcctcatgtcgggatcctgtggtgtgatgtctgggagagtaccctgaacttagtacttaaagtattaagactatgtcataatgtctcattcttagaccctgtcgagtatgtgtagggccggaaaatgtccttcaggcttctttgagttgggtctggatcctgaaccactaggttttaatccttgtcctcatcagagggacagacagtattgagtgacccaggggacaaagtcaaaatggctgtgggcactggcaagagaggaggctctcaaataaggaaacaatggcatgaaaaagttttaacattatatatatatatatatatatagttaatacacatgcttgtatgtttttgtgtatgttcatgtgtgtatgtgtatgtatataaaagcatcaaaattgatatatatcatagggaaaaccaaaacttggtaagatttcattttacccgttttacagtctaaaccttaaaactgcttgcaattttaattatcaatgaggaatggacataataatctgttcagtgctcaggggctctgaagcccttaaattcttgatgtaggaactctccctccaacccagagtgccagggttttgcttgccacctcttctgatctgtccttaccttctccgtgttttccattggtgaagatacatctatgtctcagctcaagccctgctcccattgcattggaacagtgtgtagctgtgcacactgtccacacttaagaaagggtgatgccagactcaaaaagccttggggaagagaaagctcatcccctttagatgaaagaaatcctggagtgaggccaggtggaatattctcaagtcattcctgatgtgtcatttgtctacagcagagcaaattatggctgccttttatgggcatttgaaaggccaaaggcagcgatccactctgagtatataccccaaagaattgaaagcagggtcttgaagagatatttacatagtcatgttcacagtagcattattcacaatagccaagaatgttgattgcaacccaacccaaatgttcattgacagatgagtggataaaatatggtatgtacatattctatacatatgtctacattaggctaaatgaattagccagtcataaaaagataaaaactgtaggattctagttgtatgaggtacctagagtagtcaaattcatagaaacagaaagtggaacagtgattgcttggggttgtgggaaggaggaaatggagagttattgcttaatggatgtggagtttcagctttgcaagataaaaagagttctgaagattgcacaacagtgtgagtgtacttaacactaccgaactgtacacttaaaaatggttaagatggtgaattttatgttatatgtattttaccacaattaaaaacaaacaaatcctaatgcccaggctgcaccacagaccaattaaatcagaatctctgtgggtggctttcagatatccttattttttcaatttccccaggctaagctaaggtggagaaccactggaccagaggcaggaaatgcaatcttgaggtggtagctgtaaaccaggggtgaaatgaaaagaatggaatcacagggaataaaacaaattggatggtttggacagtcagtcttcagcgatagatcagatatggaacgaaggaaagaagaaggaaaaagaaaaataatggatcaaagaagtttccaagggcctagactaaattgtggatttatggaaaaactgaatgtttattggtaggtgttgggagtgattatttattttagtttatggtaatgcaggtagaaatttcttagaggcagctggaaattttcattgccaaaattattcatgtatttcccttgtagaagccagagtttcattttacagtaaaaatgaacttttaaaaaaacatttgttcatttatttgtttctttttaagtgtttaattgttagaggcagctggaaattttcatactcaaaattattcatgcatttcccccatggaagccagagtttcattttacattaaaaattaacttttaaaaaatatttgttcacttatttgcttctttttaagcatttaacggacagataaagagtgaatacattaaaattatacaacatgatgatttgatataagtatacattgtaatgattatcataatcaaattaatgaacacattcatcaccacccatgctgtacattagatccccagaccttgttcatcttataaactgaaagttcgtgccttttgatcaacatcctcccactttctccagtcccctggccctggcaaccagcattttactctctgtttctatgagtttgacttttttagattctaaatataattggggttatgcagtatttgtctttctgtgtctggctcatttgacttagcataatgtcttccaggttcatccatgttgttgcaaatgacaggatttccttcttttttatggcagaataatattcgattgcatatatgtatctgtatccattcatctgttgatggatgcttaggttaatcccatatcttgggtattttgaataatgctgcattgaacatatgattgcagatatttttttgagccatcgatttcattttctttggatatttttatccaaaaaaccccaaaacaacaacaacaacaacaaaagaagaaaaattgcccagggagcattatatcttcaggagccaagaataaacctagtttcagagttccttttggcaaagccatgaagttggagagctttgtctgtggcaatccttctcttgctgtctcctacctgcctctgaatgttctgtgggcctccactttctcaggatcccattcaagtcacattgccctgttcctcctctctttctagaaattcctggtaaacaagtaaatcccatagtaaacaaatttgcgtgaaggcaatagaaactcccacactattttttctaagagcattcacatttttaaaataaatggaatgaagagatcaatacttattataaaataataaaactagaatggtgatatttcaggaaggagaaattttggataagattgccatttctggcctcttggaagcacctctgtaaatagttctgcttaggtgttcagacctgggtgggcaagaggggtattcagtgatttgcatggacccagagagtcagcagatgggtgctgggaggaggatactgagtcacatatgtggtctagacatatggatgatgggaaagaaaagtcatttatgacattaaatatatcaccttccagtgccactaaatcatgttttctgagcagagcagagtcacagctccctactttaccctgtggtattcagcaggccaaagatttaaggaaggacttaaaaagtgtcctttggatgccttcatcacagtgcctgaaattgcatgctgtgactacaagcctttgtcatgtttactgatatggtttgactctgtccccacccaaatctcaacttgaattgtaactcccagaattcccacgtgttgttggagggacccaggggggaggtaattgaattatgggggctggtctattcttgtgatcatgaataaatctcatgagatctgatgggtttatcaggggtttccacttttgcttcttcctcatttttctcttgctgccaccatgtaagaagtgccttttgtctcctgccatgattctgaggcctccccagccacgtggaactgtaagcccaattaaacctctttttgttcccagtttcggctgtctttatcagcagtgtgaaaactgtattagtctgtaatacagtaaattggtaccagcacagtgaggtgctgctggaaagatacccaaaaatgtggaagcaactttggaactgggtaacaggcagaggttggaatagtttggagggctcagaagacaagaaaatgttgggaagtttggaacctcctggagacttgttgaatggttttgacaaaaatgctgatagtggtatgaacaataaggtccatggtgcggtggtctcagatggagatgaggaacttgttgggaactggaacaaaggtgactcttgctatgttttagcgaagagactggtggcattttactcctgccctagagatctgtggagctttgaacttgaaagagatgatttaaggtatctggtggaagaaattcctaagcagcaaagcattcaaaaggtgacttgggtgctgttaaaagcattctgttttaaaagggaaacagaggataaaagttcagaaaatttgcagcctgacaatgcagtagaaaagaaaaaccaattttttttttaaggtgaaatttaaggcggctgcagaaatttgcataagtagcaagtaacctgttaatcccctagaccatggggaaaatgtctccaggccatgtcagagaccttcatggcagcccttcccatcacaggcccgggggcccaggaggaaaaagtggttttgtgggccaggcccagggtccccatgctgtatacagcctagggacttggtgccctgtgtcccagccgctccagccttggctgaaaaaggccaacacagagctcgggctgcagcttcagagggtggaagccccaagccttggcagctgccatgtggtgttgagcctgtgggtgcacagaagtcaagaattgaggtttgggaacctccgcctagatttcagatgtatggaaatgcctggatgcccaggcagaagtttgctgcaggggcagggtcctcgtggagaacctctgctagggcagtgcggaagggaaatgtggggtttgagtcccctacacaaagtccctactgggacactgcctagtggagctgcgagaagaggaccaccatccttcagaccccagaatgtcccgtcagcttgcactgtgcacctggaaaagctgcagacactcaacgccagcctgtgaaagcagccaggagggaggctgtaccctgcaaagccacaggggtggaacttcccaagaccatgggaacccatctcttgcaacagtgtgacctggatgtgagacctggagtcaaaggaaatcattttggagctttaaaaattgactgccccattggatttaggacttgcatgggccctgtaacccctttgttttggccaatttctcccatttggaatggctgcatttacccaatacctgtacccccattgtatctaggaagtaactagcttgcttttgattttacaggctcataggtggaagggacttgccttgtctcagatgagactttggactgtggacttttgggttaatgctgaaatgagttaagactttgggggactgttgggaaggcatgattggttttgaaatgtgagaacatgagatttggaggggccaggggtggaatgatatggtttggctgtgtccccacccaaatctcaacttgaattatatctcccagaattcccacatgttgtgggaggaacccagggggaggcaattgaatcatgggagctggtctttcccatgctattctcatgatagtatataagtctcacaggatctgatggatttatcaggggtttccacttttgtttctttctcagttttctcttgctaccaccatgtaagaagtgccttttgcaggcgcggtggctcatgcctgtaatcccagcactttgggaggctgaggcaggtggatcacgagatcaggagttcgagaccagcctgaccaacatggtgaaaccccatctctactaaaaatacaaaaattagctgggtgtggtggcagatgcctttaataccagctactcaggaggctgaggcaggagaattacttgaacccaggaggcagaagttgcagtgagctgagatcgcaccattacactccagcctgggcggtagagtgagactctgtctcaaaaaaaaaaaaaaaaaaacaactgccttttgccttctgccatgattctgaggcctccccagccatgtggaactgtaagtccaattaaacctctttttgttcccagtttcaggtatgtctttatcagcagtgtgaaaatggactaatacatttactttggacaatttaagcaggaaagtccaggctactcctggaaatgacgataacaagaaagagacaaagcacctgaaaaagcatgtagagttgttgagcttttatctttctttctggttcagcatctggcatagtaggtgctagactgacacttgttgaatgaatggaggtatagtagaaatagcttctctgggattaattttatggtttgtagttttgttgcactatgtatgggtggcatgttgaaggaaaaccctgaaggcctagattccagtcccactttcgccactcattacttctgtgacattggcccagacactttgacttctctggatctcatttcctacttgtaaaacagggacaataatgctgtccttctcatgcacatggttgttatttgcattaaatgagataatgggcatgaaagcaatggaaaactcttaaggtactctacaaatatagaatataatcattttgaaagcacctggctttgtagacaactgcgtgaactaatgtatattgatcaagacatgtgtctcgttaggtaaaaactgaaagtaaaactcatacacttaagatgtgaaaataaactcagcatctggcgtaacactaatttcaaaaagtagtatattaatttcaagtaggaaattaaaacaataaaactgtgatgtgaaaaatgttcaacattgatgcctctgacctacttctgatgtccaacatatttacaattctcccgaagacatttctattaggttaaaacccattagtatttgtgaacaaacacagagtttctaccattcactgggcactattaggtactaggtgtccggggatatttctattgctgttcttagctctattgttggtttacttggccagtggttgctagctttgccagtgtgtgtgtgtttgtgtgtgtgtgttacttatcacaagtttcgttagcttgacaaagagctgtgtatattcatttacatgacaaatactttttttggattagcaactctaataagtacagggtatttagaaactgtgtgtgtgtttttctacctgcagtcgtagtcttaagtatgtttcttaatagctattgaacataagtttaatattagctggatgaataaagtattagttactgtattctcttaaaaatagacgtagctttgttacagcacagaaaactgagctgacctcttactagattggctaaaatgaattctgattaaacattttgtaatggtttataaagttcgcttctctacagtatattaaaagatttgtttaaatgttgactgtaagtttggtaaaaatgacaaagcggtaaaaatgacatttggtaaaaatgacaaggcttacactttttgatgatgttcattttccccaaaagtacagctaaagctttatccattataatgagagttcagaaaaggcaaatgaccacctctttttttaaaccaatatgtctttgtgcagtaattttcttgtggcaagtggcataatctgggcgaaggtagtgataaaactcagatatatttcaagaaagcgagtaaacacactaatgacaatattcgtatattacatgcatctgctgcttatgtacttaaaaaaactaaataggaaaatcttactcatctctgtagaaaaacagggtagagattacaacttggggacttcgtgatattttgtctgtgtgcagtttgtcagaaggcaatttatctaaagctggaaaaggatatggtttggctgactaaactgtgtagtgatacgagtgatacgtaatgataaaaatgcttaggggaattttcggggcgctcaagtcaagtgtacagtgctgtgtgggtgtaaaaaccagacttctctctctgtgaaagttgctgacattttataccacatgctggaccgttaaatcacaatttacgtggtcacttgtaaatacgcctggtggtggagggcgagcttgtttgtgcacactttgacatgcttccctgttgtgtgcctctcccctttttaaattgcactggatacttttgttctggaatccttggctgtctaacctgaaagcagtttgggtgagaactctggaactgatttattttcataggtgctccctgaggggaggtttgaaggataatgcagaaaagcaagccttccaatcctccaactaaagttctctaacttgctattaacatgatttcaggcttgctagagtgcccgaaattctgacatgaagggattccttcttccaccactgggatttggaagtccctaggatgtttgaatggggcatattatttaaactcattttcagtctcctcattggtaaaatggggctactcatacttatcaaagagggtttttgtggagatcaaatgagacaatgcaagtcacttacttgatatatgcttaatagtgacaaacatagtgatatatatatattaatagtgatagttattgcaatttttctttttgttagggggaagaggaggacaaacaggcctttaacatggtggagaatttgtttcccttccaaatacagttggaggattacagaattgatgctcaaagagaaggctttgctttcattgcttaagagggtttcttggagaggttcagcaagagaaacacaaaatgagatgtagaaaggggatggggaaggagactgcatactaatgtgtttcatttccaagtgctttaacttttctaagcactaagtcatctgctaacttgtcttcataatatatgggtaaagttggcagggtgggtatccctttctacgggtgaggaaactggagtgtggacagataaactcacctgttgtcacacaacaaatcagtggtacagttgggattaggacccatgtctcatactctgagcacagcagtctctctattaggtgacattctcagagttcaataatttctttcacagttttgtgttcagacctggggtccccattgctgagcctattattggcaccttacaaaatatcacatatgagaaaggttgtagtctcttggtccaaaggactactttcacctggagatggttggagttgtagtatctgagttagataagttttcacttcacggtcatgggtggaggtctttcttggacttgggccaggaagaatcactgaccaggaaggtcacacaaggcctgagtcctttctaacaccatctgtgcactgtatttcagggcctagtggctgcattgaaaggaatggaaagtagttgctggttatgttgagaaatatcaggaaagtgtgatgcctttctcctgtattccctcttccctccctcattttttcactttattgataaaaataatcccaaaagatcagagaggggttctataggtgttaaaccactgtgttatgacttgaactacaaagcccttgggggcattcaatttcctcatgttttggggtagcagcaaaatttaattttaggtagaaaagggttaacttaggggcaatgtaattcccaaattatcagtgtgaaaatcatctaactgtatgtgaaaaatccaataatgttaaaggtaattatctgggaaagtaaaaataatacacaggtctttggccagaaataaggatttggaacatttctctatgcatagagagttctctagtaggcaaatttagattcatgtcagtcattaaaggtccctgtgaagtatttagtttatcaatttagcgctacatttttctacaaagaagagttggagtggtttaggtaagaacacagatatgctaaaaccaaaccagatgaacccaagacagaaactagaaagaaggcagaaggagaggatgaagatgtagcagtgagaagcctgttggaggaaagtttgagtcagtgaatgtaagcactttagcttccttgtggcctggagagcaggtattttttggctattttctttttttatacatgtatctccagcactagaagagtgcctgacctgtagttgctcaatcaatacttgctgaataaaaatatatgaaaatctgtcaaataaagggtttaaaaaagctggactaaaatgttgaaaatgattaaagctgggtgatgggttcatgggagtctactagactattctcctctacatttgtgtgtgattgagaaattttataacaaaagcttaaaaaaataacaaagaagactagacactgtaatcactggaaataaccagacattaaaaaatctttgtttccctttttgttacagggcaagcaagtaaaaagacattttatattactaaacactatcatatgctagacagtagtaaaactatagtccccaagtttatctttgaaggactccaatggcaagatttttaataaacaaagctgatcatctcatctgtatcattatttcttattatcactctattatcatggactcccaggaatcttggagatgaatttgttcacctcctctaagaggaatcatcatcattgtccactccctgtcagcacttttttttgagatggagttttactcttgttgtccaggttggagtgcaatggcatgatctgagctcactgcaacctctgcctccttggttcaagtgattctcctgcctcagcctcccgagtagctgggcctacaggcacgtgccaccacgcctggctaatttttgtacttttagtagagtcagggtttcaccatgttggccaggctggtcttgagctcttgacctcaggagatccgcccgcctcagactcccaaagtgctgggattacagacttgagccaccgcacccggcccactatttttttttttttttttttttttttttggagacagagtcttgctctttcaccaagactggagtgcagaggcacaatcttggcttactgcaaccttcaccccctgggttcaagcaattctcctgcctcagcctcctgagtagctgagattacaggcacttgccacaatgcctggctaatttttatattttctagtagagacggggttttgccacgttgaccaggcttgtcttgaactcctgagctcaagtgatactccagcctgggcctcttaaaatgctgggattacaggcatgagccactgtgcccgacccctgtcagcagttttgctcttcccctctctccctccaggccagaggccatgatctacatccaacttctctgcaaattcctgaactctgactcgattgtccctgtcaatcctgcctttgtgtcttccctttgaacctcactttctgattctcctggcttctcttcttgactgtcccttcttgtcttgccccgttcaggtgtaggaacctggcctcagtcctaatgaggctccttcaggatgcagcctctgtgagctgcttttggcttgtcatgtaacagctctggctaggactgtgctgtgtagggagtaccgtccaggcacccagggttgctggtcattactttcctcctggccccctgccctttgggtatgcatgacctgataaggagcttaaggaaacccacattaatagcactaaattaggctctatggaaagagaactccacagtcaggatctttgtgcactcaggacgggaagcatggacaccctggagagcatttgtattaacatgggcatttaaaaaggtcatacagcttggcgcagtggctcatgcctgtaatccccacactttgggaggctgagatgggaggattgcttgagcccaggaattcaagaccagcctgggcaacatagagagaccttgtctctaaaaaaagaaaaaagaaagaaatttactagatgtggtggtgcatacctgtagtcccagctacttggaggctgaggtggggaggatcactgaagcccaggagttcaaggctgcggtgtgccatgattacactactgtactccagcctgggtgacagagtgagaccctgtctctaaaataaataagtaagcaagtaagtaagtaaataaataaagaaataaaatgttatacagttgcttctcattattcatggtagttatggtctgtaaagttgccatgaatactgaattagtgaatactgaaacatcccatctggggtaaatacagcttctggtcacaacagttcctcaactgatcaatacgtaatcttgttttatgtgtatttctatttaaaaagacgttattacttatgtattgttgatttattaacattgaacttagagcctacagcactattcctgaaaagttaattccagaatgaagctaatctaacatacatattttctcctgaggcacatttcagccttcttgcacttagaaacactagtcagaatgttagcactatacttggggtccattttaaacagtgaaatcagcaaaaaaagcacaaaaatgcaaaaaacgtagcacagcaaaaaggacacttgtttatactacaagagctgaaacaagaacacagtgtgttgctttgtttgacctcagctaggaatgtgtgcattgggtgactcaaattttatgcggctctgcgcatgtctgcaaatgtccacgaaagtgctgtattgatttgggggttataaaaaaattttagtgagcaagggaattcacaaatacagaatccataaataatgagaatcaactgtatctccattaagttagcatgatatgtcattatatttaataaaacaaaacatgcaatttactatatgtatgttataaaatatatgtagccatgtaaaatcgtggttcttaattccatatctttgagccaggatatctgagatgataaaattagatttctagatgagctataaaaatttaaaatatataatctcaggctttacatctttaggctgtagatgtttatctacttctgtatactttatatacatatgatatcatatattttaccacatgtataagtgtacaatcttaaatcttcctttattgcagtggaaaaagttgaactgagacaattttcagtgattatctgaaatatcatgtttatatttaaagaatatattaaaatctaaacactataaatctgacctaaaatattttttatttcctccttcaccttggtgaagagttgtgagcagaaggtatatattattattatcacaccataaaaactatttccaaatttacgtctccaatctcttcaaaggacagaaaactttcacatttaaaatactatgaagataaagtgccttagctttaagcaaaaaattaaccattccaagggcagtgatcatatggaatacattattaggagctttcccagagaaacaaaagagaatttagtcaaaattttggttcagcaaaacaagggataggaaaatgaaggtttcagaataggaaggcacactgaactctgcagctggagtttcctcagatgtatttctgtttccctagtctcgagagctgggcttttgcaactcactgttatagggtgattatatcattgtcacttcatcttccatgggtgcagcaggatggtggaattttgggggtggcatgttttcagtgcattgtggtcatgagaagagtccctctttagaaactactgatgcttgatgcagtggtagaaaaaactatccaggaagataaactagggcgatatataatcttttcccgctagccatccaaaattttcctaaatattacatagacaaggaaaataaagcattaaaagtccatctagatactaaggaggagtagggaaagacattacaaaacacaaaataactacagtcatgtgccaaataatgacatttgggtcaacaacagacctcatatacaacactggtcccatgagattataatggagctgaaaaattcctatcacctagtgatgtcgtagctatcatgatattgtagggcaatatattactcacgtgtttgtggtgatgctggtgtaaacaaacctaccatgctaccagtcatataaaagcacctataattatgtacagtacataatacttactaatgctaataaatgactgttactggtttacgtatttactatactatttatcgttatgttagagtgtactccttctacttatattttaaaaagttaattgtaaaacagcttcaggcaggtccttcaggaagtatccagaagaaggtgttgttatcataggagatgacggctcacacatgttactgcccctgaagacttcctttgggataagatatggatgtggaagacaatgatattgataatcctgactctgtgtaggccaaggctaatgtgtgcttttgtgttctggtttttaacaaaaatgtttacattaaaaaaattaaaaaacagaaaaaagcatatagaataaggatataaaggacgaatgttttgtacaactgtacaatgtgtttgtgttttaaaccaaatatttttataaaagtcaaaaaggctaaaaaatgaaagttacaaagaaaaaagttacagtaaggtaaagtcaatttattattaaagaaagaaaaatcttttttataaatctagggttgcctaagtgtaggtgtttctaaagtctacagtagtgaacaatcattactaggccgtcacattcactccccactcactcaccgactcacccagagcaaattctggtcctgcaagctccattcatggtaagtgccctatacaggtgcaccatttttcatcttttatactgtgtttttactatcagcgatacatctctcatcccccagtgtgtggtcaggctcactgagcagattccactgaaaatagtcttcgttttgcacacttaaaaattctttccaaacaagtgtttctttttaacattcccaaagcagattgactttttgagttttgtattgcttccaactctctcaatgtcagaggcctcaaattaattccaacatccccttgctgttttcccttaagaagctgtgatggtgttgcattcactttggattcagtccatttgtgtttattggaaggccccttgaatcagcatttccactgctctcccacatttgtcatggtcctagaaatgcttatgattaggatggggatcttgatagtagtctccatcacctttacttcatcccatggttatgaacagttgtatccagttaaaataagaaagaagtcatgtggaaaaaagggggacaattgaatattattagagcctcaaggaaggaaggaaggccacagggtgaaaaccattgcatattaagtagctaagcctaatagaagccaaaggaaacagcagcaaactgttacagaaaattcttttgaactgccctccgcccactctctccccgctgctgttggtgacacgtggacagaaatccccctgcacgtagacacacatatgcctgccttgacttctgattgaccttatcccttgaacatcaggcttaggccactttcatggattctcatgtgaacgttcatgcctaatgcctgactgcatgccctccgcaccagccactaataagaagaaggaggcttcccctggccacccaagatgaggcagtgcccaccttccctcttgtcacattctattacatcatcacattttatttctctgcctaggacttaccactgtctcgtgtattcattagttgacttgtttattatctgtcttccccaaccagaatgtaattctgcggagaggctctgtctggtttagtgtaatctccaaggcctagcactgtccttggcatggagtagcccccaggaaatattcgttgactgactgactatgaaatggtggaagaggaactttgctccatgagttgtgagtgtatgcacagcacaggtgttcagagtgattttccctcccccacgttcactacaaaaagtaccctcagttacaggcccaggggtaatggcatcaccgcattgttgactcaacttgtaactgacttctagctctgtttctgacttagttttggcctttgggacaggtcaggagggtgcagcaaaaacaaatacaccagatgactagaagctgggatcttgggttgcaggcttggtttcagctctgactcactgtgtaaaccatgggtgactcacttaacctctctaattctgcttcttcatccatcaaatatagaggttagatagatgacacttcagatcccttgtaattcttccattctataatgttcccctttacctttctttaagtgtgagcacagcctagtctcttcatgcaggagtaaacgtacttacaaaatgtcctgcaacacttagggaaatgccaccacaaacattccgagagcagcattgctgtgaactgcaccactctccttttgttccattgaagatttcagaacacatgcttctttgctctgcactttaggaatctttgtacttgaagtggattatcctttatttttatatagcatttaatctgaggatatcaagatttatttgcaacctgccattgagtactattgttttttaaaaaatgaaaggatgacttgctgaaattataagaatcactcatactgtagttgtagctgtgtagctgttgatgctacacattggaaattcagttacaaaatagtgattgattgattgattgattgattgagatggggtctcgctctgtcacctaggctggagtgcaatggcacaatcttggctcactgcaacctccgcctcccaggttgaaacaattctcccacctcagcctcttgggtagctgggactaaaggcgtgcgccaccatgcggggctaatttttgtattttttagtagaaacggggtttcaccttgttggccagactgctctcgaactcctgacctcaagtgatctgcctgtctcggcctcccaaagtgctgggattacaggtgtgaaccatcacgcccagccaaatatttattttttaaattaatacatgcacagcagaattccatgataaacacctgcttattacatgaattaagtctatcacttgccaaaatgtctgagccccacaaatgactgggtctactgagtatgcttcccgacacttttatttttatttatttatttattttttgagatggagtctccttctgttacccaggctggagtgcagtggtgcaatctcactgcaacctccacctcctgggttcaagtgattctccagcctcagcctcccgagtaactgggcttacaggcgggtgccactacgcggggataatttttgtattttttgtagagacagggttccgccatattgcttgggctggtcttgaactcctgggcccaagcgatccgcccacctcagcctcccaaagtgctgggattacaggcgtgagccactgcccccggcgccaacactcatttgctcttcaaccaactgagatttgactctttctctttagtttgctgaatcttctgttgctttataatggctgttgccatctaaaatccaaacttacggtcgtgtgttaatttctatcttatttgatagattcacagcaggtttttgtgccttcttactaggtcccacttggcattcatgctgggttacacatctatgttctgtacactcttttctgtgtacctgggatgtgttctcaatctcatctgcctggcaaacccatttttgaagatactactcaaacatttcatcctctttgaagcctttctgacccactcttcctgtgctgggaacaactggcttctcttttctgaactaatgttatgccaataaacaccagagtaagggaatttattccatattccattatttctttttgcatgtctgtatcacctactgagaattcattgtggataatgattttctttttaatttttatattcttaggcattgcctagtgctctcaataagtatttgttgaataaataaatgaatgaattactgaaaatacagtgacttaatttctggccccaacacttacgttttagaaaggttttgatctctgcctgtgaaatgctctttgaaatggctttctgagtagtaatgggattggaagagttcggagaattccatgtatcctatggtgatgtctggagtgaaacatggtatgaatcaaattgcattttagtttaaattaactcatccaattaagagaagttaattagattaacctgccagcaagggattagaactggtattatgatgactagtttcttcctcataataatgaatgtgaaatttcactaatggagtgaaatttgtgcagccacccatggattgattgaattggcaaaaattcaaataagttaaaaaaatatggctctcattgcttttgactaatttataatttttaattgaaaaaatgatttattatcagtgttaaagaagacttaaagaaataaataaatcactgataaatctgtcatcctaagcagcagatgtttttgagttaaatataacttttgcatacatgtatatttttatatagttgtatcatggtatgtttttcatttttctataggcttcccatatgtgatcatctataatgaatgtatagcaatatttaccaaaatatattctacagaatgctattttcttgagatttaattgacattacttggggataataaaacatcactgaagtcaaataagtttgggaaattataaaagtaaacaaatttcttcactgtagtatttctgaaagcctataatattgtaaaatgcttttttaaaagatgaggatttgacacatattctccaaattaatatttacgtgaaatgttttctttttacactatgaaaaactgtcacactaaaaactgtttagaacatactttgggaatcagtgatgggtagaattctgtggtgctgcaataacctaatttactaccccattcctctactgttggacaaggatgttcaaacccaagtttcttaacgtggtcgacacatccatgtagggtctggtccctcttggcctcatctcccaccctcttcccccttgctcactgtgctcttaacaccttggtttccttcagtttctggaactcactaacctctgcccccatgtcaggcagggcttttgcacatgctaatttgcctcttatagataatagtacttttttttttttgagatggagtctcactctgttacccagactggagtgcagtggcatgatctcggctctacaacctccgcctcccaggttcaggtgattctcctgcctcagcctcccaagtagctgggactacaggcatgcaccactacactcagctaatttttgtagttttagtagagatggggtttcaccatgttggttggccaggatggtctctatctcttgacctcgtgatccacccacctcagactcccaaagtgctgggattataggcatgagccaccatgcccactctgataaatagtacatttatcatgtttccttttatcgaattatttcccaacttactacccattttcaggagacataattagtaacataaagaaatctagtactattggtttcattttgaaccagcactgtgctgcatggcattttcctgtctttccagtaacagccaatcacagctcactattatggatgtcagcctcaacaaaaccaaaagagcaaggcacataatcgatcacaatgccaagaccagtgactttcagatcagttattctattctctctgtggatgagatccattgagggtcggccagatgtcttttttcaggggtttttcagaatatatgtttcatgttgttacacatcattgctcacaaggattttgctcagtgtgacaaggaagtggcagtttgcttgctccttccacactcttgaaggcctatggtgctctaaaggaagtgaagggtgactgttgacctagttagagcagcctcccaagaatgcaaaatgagacctgggggacacacatcctactctgtattttgcagctcatcagtaattttattaggaaagaagatgaaagtatagaaggaataattatcaaaaagtataagtgaccccaaatcatagagtaaggtttttggtctaacccattgattttacagatgaggaatggcagatccagggctgagaccacaacacaacttcaggaggaggcattcgcatagacaatgggatgaatggggccccctggagttgttcagtgggttagccctgttcagagaagttaagagacttgtccaaggtcactttgtaggtttagcctgctgttcttttgtgtttgatgatagaataggcatgaactagagaattacaatttggactggctacagtgatagtctaaaattagtgtaaagccaaaagtataaactcagtttaagttttgaaatgaattgactcaatcaaggtgggggacatattggcttgacagcatttaaattaaaaaagtctcagtgaggagttagttggccataagcactgtgttaggcaacctgaggtctgcagtggtaaagtgatttattggaatcctatgctggagtgatagagacagtgcatcccacacccctgtactgactaggacgcaactgaaattttgcactgagttcaaggagtcatattttttaaagggacaataataaatctttgatctccaaggtcatgtgcagggcacttagtaccaactcaatggatgtttattcagttagtttgttgctaaactaactatgctgtatgtaaagtgcctgacacatagtaggtgcccagaaatgttagtttttattctcttttccggaggaggacaatgagattgctatagattcttgcaaacatgctgactaaagaacccgtgaggaagttaggaattactgtgaatctttgagtcttctaacactgagagcctgattctctgctttatttaaataataataaacaggatttattattaagatctcattggaactgtagaaatgtcagtgagtctccctccctccctcactcccttcctctctttcttcctcccttcctcacttccttccttccttcctcattattgattatcctggcaatgtgttacactctgggaattcaaaaattagtgatttatgattactcttaagggacagacatggaaacaaacacattacaatatagtgtgatagttgcagcaatagaagcacgtggacagcacagatataataattcaattcaacacatacttgctgtgagaacttctatgtaccaggcactgtgctaagctctgagaatacagctgaacacaagacagacacatctcttggggggagatagacattaaataattaattacatatgtggaagtattccacaagctaccatgagaatgagggttgtgagaaaagaaaggcttcgctgaagaagtagtgtttgagctgaggctgaataaagtgtagagattggccaagcgtgaagggaggggaagagaatcccagcgagatgtcaccagtgaacttccctaaagccccgtcatcaagcttccctgaaatcgtttttgtaaagaacctttttttttttttttttttttagagataaggtcttgctttattgcccaggctggagtgctgtggcatgatcagagttcactgtaacctcgaacttctgggctcaagcgatcctcctgcttcagcctcctgagtagctaggactacagccatgtaccaccatgcctgggtaattatctttttcttttccataaagacatgatttcactctgttgcccaggctggtctcaaactcctggcctcaagtgatcctcttgccttgatcttccaaagggctgggattacaggtatgagttaccacacctgctgatttccgtgaaatctaaatgttcttttgcaaagttcgtgtgtgaggatcacttcaagtttttctcatatttgctggagagagaaataatccaagatgcacatagaggtattatagtaaacttggagactcatgcttgttttggcagtgttggtgtgacttacagacaaaatagaaggtcttgtttgttatgaattaaagagtttggagcagatcttccacacttatatggagattcatttcttagggtgactttctctcaagggcatcttataaaattcatgtattctaagaaaatataatacattagcaggagtaagtgtaacattactttttgaaggaagagaaaggaaagaaggggcaaaggccttgttggggtcgggggagtgacctgaaattaaaggataatgaaggggaggccatggaataagataccacatttctctagactcaaactgtctagggctggccttgaggaatgggttaaaataaaatatagaaaaaaaagagaaaatattggaaaccaaaatgatttacatgggtgctctgaattcatgaatcatctacagagaagtaagagtgaaaaatcttccttgaaaaacccactcagtgacacttctctgaccaccctctcctggatgatgttaatcgccttttcttctgtactatctcacttctttgtattcatctcaaattttgcaaatgttacctactgtgttatatggtttgctcgtagtttttgtcttttattcatctctaaactgcttgagattggatttattctctcatgattctcggcacctagctcagtacctgagatttggtactttttttgggtgaattaacgagcaattttgagggaatggaagagagaagaatgatttagatagaggttagacaaaaattaaaatgttgtggaggacagatagggaatgaagtgtcaagataaaagagctatgacaacaaagggggcctgacgcagtttgggccctcaggaggtctctgagggagtgctgttgagttgagatctgaaagacgatcaggcatgtactaaaccaggagaggaaacctaagggagcaacccaaacaagtctcctggataatgatggaagtgagttaagagctagatggaaggtaaaatcaataaggctttattactcattcaacagatgctatattccttacatccctctagctctggagacacagtggcaaatgagcaagtccagcattcaaaggacttacattttagtagagagagatagataaacaaacatgcaatcattatttgttgatggtgccagagataattgacaaggatggcttccagctttctaaattgggcaactgatggatgctgggctatttgcagagacaggaaatgctgaaggaggaccaggtctgtccaggcagggtatggattccattttggacatactgtttaagtggctttgagatgaacaaatggattccaagtagtcagttgtatatgtgggcttgggtttgaagttgtctgggcctgagacacacatctgggagtcagtaacgtatagatggtaattaaaaccatgggggtaggaagagctatccttacaaccactcaaaccaggcacttcaattcatggagagccgttcacatagactgtggtctgaatagtgtctcctgcatttatacagagtggtgaccatgggtgtggacaagatgacctagtgaaaaaatatggagtgagaagaaaagtgagtttctaggactaaatcttcaattacttcaacatttaaaggcccggctaagaggaaagagttcttaagggagagtgtggtggagcagcagagttgggaggaaaaccaggagcgtaatgtcagtgaaacccaaggaagagagagctttgaggaggaatcggatagcagggtcaactgctgctgagaaatctagtaagatacgaactggacacatgtcatctcagctcattggtggcctcagtaaaagcagttttgcaggagtgataaaagtggaataatatggccagattggaataggttgagaaatgagtaggaggtgaagacatgtagacagctgatgtgtcctataacatgacatttgaagaatgtcctcacccagccatgtgggatgagccccaagttgaggcaattcagctcagatggaagtggtaatcttgcaagaaacccaatttggagttgtcgggcttagaagtgattagggctctgagaaatagatttttcttttttcacttcctctgccattttattctctcaaatatgacattgattagaatgccagtgtttgaggtgatgacaagagagtgtttttggaatagggactggaatttccagcacacacattgagttgattctactgttatatttgaatagcactaataaattgggaaaacatggtgcagaccacacacaactgttggaatgtcctccactgatgtaaagattatatgattatattccccagacccttgcatttaaatacaccctactcttcttgcccagtctgtccattggcctttaaggaaataccaatcttgtaatcactctcagcttatgatgtttctcggcctcttcaatggcatgtgggaattagtgtttcctgggtgaaggttaatttgggggaagagtctagataactcagtggctttaggactcatttgttgggaccagaggtcccacatttgcccttgaccttatgggatctgtgggttgtcttttccctttgttgtgggactgccatccaagaacctgttctctgtatctatagcatggagctgtcctccagagtgctctttagaaagagctccaataattgggaattatgcaaatttagaaaagggtatttcaagtctattttcagtcatttcccaagatatttaaaagtatagtatagagaaaaatcgttttgcatttcatataggcttgggatagcccattgtcaaaattcagtgcatgtcacaatgtaattcactggaggaaaatatgctatcaacaggatttccaagcaaaaagcctggcactaattattgccctctctttagtgtctttaactgccagatctaacatgtgttaaccttatacagcatagttgtaacaccaaaggttagtctctcattcatacaaaatttgtgtgagcttaggaattcaccactaagcacatctaagcaatgttaaaagagtgggcatatattcactattctgatataactgcacacagagttggtaacttgaaaagtgaagaatatataatataaatggtaatgtgaaacaaaaaattctactgaagtttatagaatgcaggtgtacctatcaacatcacctgtattcagccatttaaaaatctctcattttacacacacacacacacacacacacacacacacacacacacacacatctttgctctaatcaaatatttccacttaaaattcaaatgtttccttgaaggaagatattgtactgtttcaaagtagagttagagtcaatacagtctttagttttacacacaggttcactggaggctgttctgcctcggtagcagtcactcagtttgaaataaattagtgtttggaggccgggcgcggtagctcatgcctgtaatcccagcactttgttaggccgaggtgggcggatcacctgaggtcgggagttcgagaccagcctgaccaacatggagaaacccccgtctctactaaaaatacaaaattagccgggcatggtggcacatgcctgtaatcccagctactagggaggctaaggcaggagaattgcttgaacctgggaggcagaagttgcggtgagccgagattgtgccattgcactccagcctgggcaacaagagtgaaactctgtctcaaaaaaaaaaaaaaaaaaaaaattagtgtttggaaaagctgtggggtggaacaccttcttactctttgggagcaactgggaaactaaagagaaagagatatgtcttgtcttgaaggaaacttgttgacaattgcttaatagaatgatgataactgaaaaaaatatgtattcgttttttagtctctgaacattcccatctattttgtgttggataggaacatctaataggaacatccactagtagatagaaacatctgctatgtgttcctacctgtgttctctatttgaagttggagatctctcaagaacaagtattctttcaggaaagtaccactgctatcagtagtccttttttataatttttttttgttttattcatgttttcagtgtcacttttacaatgtactcctcttgtattctttctttgaatggtcagatgtcaagcactgtaggagttttggggcaggaaactggtctgctaaatctgtgaactattgcaggtcactgctgctgtgatactttgggaatgaagtcccaatgatacctctaaacagtcacagctgtttgagctctctcagctactgcaaataattcactgacctgcacagttagaactatcaagagttttttaaaagcaatgttgcctgcatagaattgagaagttgtagaagaaaagagagaaggcctattcaatattttaaagatttattatgtttttctgattataaaagtgatactggctgattacagacaacttggaaaagacatattaaatattaaaagaaaaatgttctatttatggagcgtttggatactatgtttttgatgttgtgcatgtgttcttggggacttgacttcatgtcaataaaggacagcagcatctcataatgccactgccattggccttgcacctctgctctgattttctttcctttcacaacatcataaacaaaaccacatgttacttgtgtggtcaagttaaaggaaagaatatctcaccaaaatgaaagaactacaggtgaaaaaaataaacccagccctatggttttcctttgctcactgttatgtttcttgtaggaggcttgaagtggcaaatgtgagccagtggtcatagcttgagctatctgttttctgtatgcactgcatccaaggctggctttcaactcactaaagaaaatttatcccaaacaacaggactttgattttccaagctccttttcaaactcagcttggctttattgatgttgaatatatttattcatggtgtttgcactagtcttggagctgtctgtgtgagtagacctgactacatattgaattatacattattcatttgctataatttctttgacagccattttctccttctaaattctgttgtagaatgcaggtgtacctatcaacatcacctgccttcatccatgtttaaatctctcttgtcttatgcacacacacacacacacacacacacatacccctttgctctaatcaaggatttccttttaaaaattcaaatgtctgggcaaggacttcatgactaaaacaccaaaagcaatcgtaacaaaagccaaaattgacaaatgggatccaattaaactaaagagcttctgcatggcaaaagaaactaccatcagactgaacaggcaacctacagaatgggagaacatttttgcaatctacccatctgacaaagggctaatatccagaatctacaaagaacttaaacaaatttacaagaaaaaatcaaacaaccccatcaaaaagtaggtgaagaatatgaacagacacttctcaaaagaagacatttatgcagccaacagacacatgaaaaaatgctcttcatcactagtcatcagagaaatgcaaatcaaaaccacaatgagataccatctcacaccagtcagaatggtgatcattaaaaagtcaggaaacaacagatgctgcagaggatgtggagaaataggaacgtttttacactgttgatgggtgtgtaaactagttcaaccattgtggaagacagtgtggcgactcctcaaggatctagaactagaaataccatttgacccagcaatcccattactgggtgtatacccaaaggagtataaattatgctactatgaagacacatgcacacgtatgtttattgcgacactattcacaataggaaagacttggaatcaacccaaatatccatcaataatagactgaattaagaaaatgtggcacatatacaccatggaatactatgcagccataaaaaaggatgagttcatgtcctttgcagggacatggatgacgctagaatccatcattctcagcaaactatcacaaggacagaaaaccaaacaccacatgttcttactcataggtgggaattgaacaatgagaacacttggacacagggtgcggaacatcacacaccagggcctgtcaaggggtgggagcctgggggagggatagcattaggagaaatacctaatgtaaatgacgagttgatgggtgcagcaaaccaacatggcacatgtatacctatataacaaacctgcatgttgtgcacatgtaccctagaacttaaagtataataaaaaaattcaaatgtctccttgagaatggtggctttctaagggaactaggagttttctaataaatggctaaaagagagacattcatggaatgatgtagaggatatatttttgagagtggagtataaaaatcagcatgaagcataggagatagaaatgggaagtagtagcatgtcaaaggcaagcctccattcatttaaaccagcacctagatcaagaaagagaccatcgccagagccccaggaggcctcctgcaaacctccttcttatcattaactcatcaaaagtaacttttaccctcacttctaataccacaggttggttttaagtgtctgctgggttctgctgtgatgacaaagaacccagttttcagtggtttatattctgttttggatgctggtatcgggatactgcacactcaatttcagctttgcctgccgtgcctatgtcaggttctgcatatagaggggactggggggagcctgcaagcctagagggaaagaaggacttgcttcctcctagccacttgctattcttctgggcattagtctagtaatccttctatattgtggtgatggcagttccttgctcttgcagcagctgaatccagtttgtagttcttcctaaacttgtgggtctggcttcatggcatccccatagagcactagctgagcagcaccacctccttagagctctgggtttcagccccatggggcctctcttccacgtttggagaccccagcaacaaacggtcacaggtctcctccaaaagtttcctttgttcacatagacctacctccttgatgcctaagagttctctttttaccctagctttacaaactcagctttgtgcctagttgacacatttttaatgtgaaaagatctctattcaaatagctggtaagatttctgccttttaagtaataaatttagatttcttttatcttttttgctttcactatgtagacactcatttctcatacccctattctactaatatagttggaccatttattcatttacctaaaatattgagcactaactttgaccaatttaatcaaattgtcttccaagaatacactagttttataaaccttctttccttatgctcacaaaagttaaatattctctcaattcattttcttgaagaagtatcttctggaacctaagaccagctccaggctgagcagggtctactgcatagctgtttccttataaatcttcatttatcaccgttttggagattccttctcttgtatggggtaacttgttatctagagctcatgttttctctttcttgctttgttcccttgttttgccagagcacaccttctggtagcttttgaagaaagagtgcatgggagaaaaaaatgttttgagatatttttcatgtaaacctctcaaagtataaaattcaaggctagaaattgttttctgtcaattgtaaagtgaatgcttcattgttttcttgcctctggtttctctgttgagaagtttattgtccttttgactactcctttttatgaaaatttttgtttctctatgttttcaggatcctcaatattggaaatcttcacaattatgtatatattggtgtgtgtatgctttcagccattgtactggacactcagtgggctcttttgatgaggaaactcctgtctttcattttcaggaaattttcttgaattatgttgctgataattttttcttgttttttttttttttcctctagattatatgtatattgaacttcctagactgattctccagttttcttaggttttctctcccattctccatctggtttttcttcttccttttcttttttccccataagtgcaatattctcctttatctctctgaagttattactgatagattttttgaagcttttttccccctacacactctgtttcctccaaggtgcttttttctttttgtttatttggtatttgtctttcataatagaagttttcctcgtatatcttatatccttaattgcctgttcatatgctaaaatgggacatagaaagcctattgaaaaccttgtgtgtgtatatgtgatacacttgagggtggtttggctagaatattcttttggataaatttctgatgctcataactttagtttctttttctcttgggctggttggattcctagagaagactcttccaacctactgccagagggtagaagcctgtcagtgttatgggagctgagtgagaaaataagcctgggggtctcaatatcttgcattttacttcatccacctgttttcaatatgatacatccacactcattagtgtttattgtcttgcaatccagagaccttctttttaccctctctagagaataaacctttgtcatctagtagggagagtaggaatttgaagacttttaagcaaaccaattttagcctaatattattctctctttcctgagatacctgaggttctgaggtaggaattgggttgcttctgggccttccctgatgtagataaggatttagctttctttgtactgtgatgtcagttaccactttttcatcagctaacttccaaaaattattttttttgctattgtagcgtctcccatcttcacatttgtccttatgggcttatgcctttaagcaaatctctgtactggcatttcattacagttttgggatggagaagaatctgaagtgtgagtccagtctaccatttttaacagaaaatctttgagatttcatggacgttcccctccacttttttttttttttttttttttttgctaggctgacactatgttgtgcactctaacacagggacattgatgttgcatgcgcatgttttcaccttagcatgaatcattttcaactggcttcttacttcagtccctcaaaccaatatgttcttttttttttttgagatggagtcttgctcttgtcacccaggctggagtgcaggcgatctcggctcactgcaagctccgcctcccaggttcacgccattcttctgcctcagcctcctgagtagctgggactacaggtgcccaccaccatgcccggctaatttttgtatttttttttttagtagaaatggggtttcaccgtgttagccaggatggtctcgatttcctgaccttgtgatctgcctgcctcagcctcccaatatattctagttgagtcactccacttatctttcagacataaccctacaagtctgaattctaaccctggacacagctcaggctcaaaccagaattcttttctctcacgatagccttctctttcactagaggagtcagaggtgggctgttcaaattggttctggtgttacactgttgactcattaatagaagcatgttttccctagtgtgattgttaaaatcctagttataaggcactcactttgcatataattgcatattttggtactcagtagtaggaaactggttgaggatattctgatattctagaacatttgtttcaaaagataccttgctatgatagaggcatcacatgcaatactatagctataaatatagttattttctgaattgtctttttagagaaacatacttgctgataggaaatttttaccttggatggctggttatataatgtcatattaacaaaacaaataatatctagagaaatctgtataatcttataaaaattatgatgatcaactctagtacttccagcctgcagaaatcttggtcctttgtatgacatgaagttgccaaaaagatacttagagtggtttcatcttaatattttcatatgtacatcaaaggaatatgaatgcttccaagatgttagtctgttttgttgaatttcacagctttgcatcccgagtcaggaagctgtcatggcgttgtgctggtacaccagtgcggatgccagcatgtgcatatgctgacacatatgctaaaccaggagtcaagactccagcactcagatgaatgttagacatctctcatctaaattcagagccaaggaggtccgtgtaggcaggctttccctaagcttcccttctggctatgatttgaaattaatcattttaatcataggttaacatcagggtccatgtagttaaaacatgagacttgacaaattttcatagcctaaggctacagtctttattgccagagcagtaagccacggaacatagtcattgtggtaggaaagatttttgtctgtctgacgtctttgtgggtatcattacttcccagttctcaggtatgggtattctgatggggctatctacaacctttggatccagaggcaggcacatgacccaagcctggaccatcaaagtgctcatggagttgatggcagtgatggctcaggagccagcacctgactcagcaggcttgtctgagcctgcccatgagctctttctggagctgtctgggataaagtgccatctctttgctaggctggttggctgtaaggacagcatgtctaaagctgctgctggtcatctttgctactcctgggagagagtttgagaaacaagttagtacagagaaagcagaaccaagggatggaggaaaggaggcagattccagatgatattctttgtaccccaggaatatctcaaatgaggaatgcccctggactttctaattttgagagtccaataaattctgtttttggaaagctggtttaattggattctatacctgcaattgaaggagactgactaatatggttatattggtcttcaccaactgtaatttttctgtaaactacgtatactggtcagattttagatggcaatcaagttgaattatccaaccgagctgtctgtattgatgagcttaactcagtattttctaaatctctactttgtacagtgtagacacctctaaacaagtaataacaaactgatattcaagcgcaagtggtccactctgactaattgtccacctctcagggtttagagacatcccttgtaaatgattatggaattacctatttcacagagacactgtggtaattatttcaaataagtcctttaggacccttgaatatacttttttttttttttgagacggaatcttgctctgtcgcccaggctggagtgcagtggtgccatcttggctcactgcaagctccgcctcccaggttcatgccatcttcctgcctcagcctcccgagtagctgggactacaggtgcccaccaccatgcccggctaatttttttgtgtttttagtagagaagagatttcaccgtgctagccaggatggtctcgatctcctgacctcgtgatccgcccacctcggcctcccaaagtgctgggattacaggcatgagccaccgtgcctggccgaatagacttaattgtaatagcaaaagttattttattgtcattataggatgcctgttaatttctctattgatcagaatgtagtaagaattttctcaaacttatctaactctaaacagatggatctaaatatatttttttcagtataaagtctgagaaaaattcagataggattattctattgtgtgttcaagttacaaatatggctgatttatgaaatgttgacagctagtattctagggttttagcctggcaattcttaaaatatttaaggaaaagagttttaaaaaataaatccaatattaaatgatgtaacataacacattgttaataagagacgttagggtctccaaagaatatgcatacaaaagaatcaaatatatttcatatattaattgacttgctaaatcctcttccaatctctctctttctctctctctctctctctctctctttctttctttctttctttctttctttctttctttctttcttctgacagagttttgctcttgttgcccaggctggagtgcaatggcgtgctctcagctcactgcaaactccgcctcctggattcaagcaattctcctgcctcagcctcccgagtagctgggattacaagtgcctgctaccacgcctggctaatttttatattttttggcagagacagggcttcaccatgttggccaggctggtcttgaactcctgacctcaggtgacccaccccggcctcccaaagtgctgggattacaggcatgagccaccatgcccagcacagtctctctttctatataacacatactagagctctttcttgtctacattaagttggtcctctgtcctctcaccctattattcttttgtaaagacagctttgttgagatagaatttatgtatcataaaattcacccatttatgatatacaattcaatgattttgattccattattattatacagaaaataagctacactgtttattttcttaattgcacatatcaaaatttgtagttacctatttacttgtttatttattgtttatgcaacataatcccaattttgtgagaaaaaaaatactgtgtgcactggacagacaaagatcaaaagaaatacaggattatggagaattttattttctttcttgaaattttctgtgttttccaaaatttctccaatgagcatcatttctttttatcagaaaatatacattactttaaaaatgatctttaagtacaacaatgtgggtgaatcttagcaatataatattaagctaaaagacgttccaaaagaacacacacaaaacgctatacttttatatgtcatacgttgttttatatgtcaaaaccaaccaaaatgaaaatactattttatttatttatttatttatttcgagatggagtttcgctcttgttgcccaggctggagtgcaatagtaccattttggctcactgcaacctctgcctcctgggttcaagcgattctcctgcctcagcctccggagtaactgggattacaggcatgcaccaccacacctggctaatttttgtatttttttttttttgtagagacggggtttcaccatgttggccaggctggttgtgaactcctgacctcaggtgatccgcccaccttggcctcccaaagtgctgggattacaggcgtgagccaccgcgcctggctgaaaatattattattttttgaataaatataaatgcaataaaacttacatcacaaaaagcaagggagtactgaacataggatttagaatgactgttatttcacatgggtagagccaagtgaatggaatcgaggaaccatataattaggcagaggttattgttaagaatctagtttttgttttatgagttcttgtaatattaaaatagaagatagataaatagatacagtccatattttataaacatattgtctccttattcgagtcgactgtcttgtgggttatagcagtttttgcaagtagattctgtcactaaaatgtgctggtgtcaccagggccagcaccacccaatgatatctctgtgtcctccttcccctgggaagaggaatgtgagatggggtacggcccaggcatgtggcatcccagcctgcaactgtgctgctgattgggtgtccatctgatcggctaaagccctgccttggttgttcagtgttttcagcatttttcccagcatgggcaaagccaccaagctcattcattaccaggccaatcagccgtatccacatgtagcagcacacccaccatcaacttgtactaagggcaatgattgcaaagagggggagaaaaggagatgattgtaggtgcatggacatagcaccttttctgatggtcagttcgatttcagtgtgaagaatttatttatttatttatttatttatttatttatttttgagacggagtctcactctgtcgcccaggctggagtgcagtggcgtgatctcggctcactgcaagctccacctcccgggttcacgccattctcctgcctcagcctccagagtagctgggactacaggcgcccgccaccatgcccagctaattttttgtgtttttagtagagatggggtttcaccacattagccaggatggtctcgatttcctgacctcgagatctgcctgccttggcctcccaaagtgctgggattttaagtcagaaactgcctcgacgttttgtggtgctcctgacgtctgcacagccctacttgcacagtctttcctgatgtcatcacgtcttgcctctgctactcatttgagacacataccttagatgaaaaggatttctgaagagaagaagtagaaagatgccctttaataaatccttccaattatagaaccaggtgtctggaatagtcctcagagaactccccactcctctcttcactacagaggcataagacgcaggccctgagggattgaatgtctcggcaccacccagccgatcctcccacaccgggaggtcacctggcctctgaccccctggctcccttcccagccccctttcactacaccatacttgtggcatgttctacctgtagagaaatgtggtttataacctccccagttatcatttatttcatggcttttacactgcctaatttaaaaaagaatttaaaatattttaccaagttatgataccctaaaatatagaataaaatctcaaaagggcagaaaccacttggaggtaagagcctgggctgacttggtttctgtggtggagccttgtgggtgtcccagtctccagggaagtgaaagtttgggagtatcttcatccatgtgtcaaaaaatagtgaaagcctgcagaagcacaaattcagcaaaagctcacttcacctaacagaaacactactgaaaaatcacttaatgtcaaaacaaatcctgtgttgtattggatatatatctaaggtctgcagacttggagaagataagtcatgtttgattttctgaaacctttgcagcttgaggggccagggtgccgggagcacctgacagggaagtccttgtcatacatgctaagaataaagcccccttccttttagaggctagccctagtggaaccggttccactccctcctttcctgttttattgattgattgattgtttgattgattgatttagagacacacctcattctgtcacccaggatggtgtgcagtggtgcgatctcagctcactgcaatttctgcctcctgggttcaagtgattctcgtacctcagcctcttgagtagctgggattaggtgtgtgccaccgcccaggtaatttttgtatttctagtagagacgaggtttcaccatgttgaccaggctggtcttgactcttggcttcaactgatccgcctacctcggcctcccaaagtgctgggattacaggcgtgagccaccgcgcccgaccccctcccctgccctgttgacacttaactgcaaacctgggagagaaaggcagaaaggaaggaagtgtatgtctggagttaactagataaaactacaagaggtactggtaagtggtggaaacaggtgtttggttataaagagtggtatctgctgttgtgctgggtttcacgtgatttatgttttctctggtgagccccgctagtatgaagacagtagggctttgctagaactggtgtgttctcggggtagtaatggtctcttactggagtcccaggaatctctgggtctcttccttttttaataacaagagctattccaataacctttttgaccctgtgatgttcatagatagtattagctttttggtttaattcttcaagataaagtttacaccctaacaggatcctttgggggtgttattccaaaggggagtgtgatgtgtgaatttcaggctgtttcaggataacgaagaaagcagtttgtggagaagggactttgaagccacagcacacacttcccagcttcttccacttttgcagaaagcattcttgggggtgggatgtggatggtgtgtgttcttacataaggtggtcttgttactgagagtgcaggaagttcctttgtttcttggtttgtggtctttagtaacgataactttaggtgaatggaacctttctgtacattttcagaaatctccaacgtttggatcatgccaggatgttaactttttacaggccgaagctgaacggcctgttatgagggagccccaaaatatgtaacatcattacctctgttaacaccagtttgtcagcctctagacccactgttcacagtggcatcaatcctggagaagatccacaccttagaatggttttgtttggttgccctgttgggaccttcactgagtcttacccaggggttcttatagtgtgtctgaggtgtgttccccaactggccctgggtgcagaaattatatttgcagccagataacttataatttgctacatatggccagtcttttttagcagttttctttcttttgcattttgccacacccactcccaatttactgttagcagccctcctggtaccttctcaccacaagggacttatattagatatctgtaggctccgagacagagagagagagattgagagtgagagagcccaatcacattgcttgcctcctgttttattttaatatcattattttttacattactgttccttgacccttgtacattaaacattaaatagaagtcaaggttatagtcatggggccagagagaggaatctaccttccttgatgactctaggctggaacaggattgaagggagcacaggagtggctagggctacagtctgtgcttctacagagaagcatgtggaacagaaggttgaggtgagaggccgagtggcacagatgaaagagcatgttattttggagttggacagaccttaactggaatgctaacttggccactggtcagctatgtggtcttgggcaaattacctggcacttccaaacttcagtgacctttgccttatctgtaaactggacttgcaagattgttatggtaatcaagtggaataataggtagtaagtacttattgtcccatataaggcatttcataaatattattttctctttcttttcattacgagggaatgagaaaaaaagccaaagacatgaaaatccccatgttctattaataacagcttccatttttctttctcatatttttataatgctttaaactatgtgggtaattgtttcagcatttaatctttccactgaattacttaattacatttatgacaaccacattttaattttgagtacatcgatggaactattaatttattctaatgaatttacaacatggctggaatttttttcaccattaattttgtggtgatagaaaactatgctgcctgccatagatttatcttgctttaatcatattttaatcaaatcaaattccttaaaagtctagataagggtccccctagaggaaaggagtaagaagattttctctgaaaagcatatttaagcctgatggtttatcagcttggttgactcccacttctgctctcaagtgttagcagaggaaacttggtggacatttttttggaggggttgggaactcgggaggaacatttttctggaggggttggaggcttgggaggaatgcatagtggtggaggagaataaatgagattagaaatttctttttccaaagaaagcggccattctgcacatctggagagggtgccgtcatttgtttggttcccagatgctttgcagtccacacttctgggaagacccctgcctgccaagtcatcattgccttcaaagggatttctttctcagcaaggtgataacgttcactgccatagcctcccctgattaatgctttaagattgattgctggtccagcctggcagacgggcgctgaatttcccatttagtactctcaggttttaaacattcaaaatggcagtaaataaaacacatgcctttcaacatccctttttcccctcagctcacagcttgggagtttaggttaactttttgttataacaggcgtttgagatgaacaaggaaagctccctaacagttctttctgtgatttgtttcttattaaattaaaaaatttgtcatttatttattggagaggagggaagaggtttggccatggacactagttgcaaaaacgaattgtaagcacaggtagtggcagattaaaaacactttagcaattagtattttccacttgatggtttaaaactgaaaaaaaaattatctccaactgctgctaatattacagcttaagaacaggctgatagatcttgcatacgaaacatctcactctgggaaaatcttcacccttctcattcttagttataataagacaaggcaatagcctttttagtttgtgtgtactgatatgaatttctccatgaagaatttatggaagctactaaataaacacatggagagctataagaaccctaaccctatgaaacacacaatttagatccacctatcatgtaaattaaacattcgtcagaagaaacagttagaggtgtgttagagctttaaataggactgtttatattaggatgagataaagactgacattccaaagttattaaccaacatgtgtctccccttctatggaatttgcctaataagaatttttttaaaaaattcaatattattttgaattaacaaatcttaattgtatatatttatggggtacattgtgatgttttgatatatgcatacaatgtggaatggttaaatcaagctaattagcatatctatcacctcaggtacttaccatattttgtgcagagatatttaaaatttactgtcttagttcttttgggatatgtaatacattatcattgaatatagtcatcctgctgtgcaatagacctcaaaaacttattcctcctgtctaactcaaactttgtcctccttgactaacaactccttgtttcccattcacccccccagccctcaacctctgattatcatcatctgataagaatgttttgacacttagaatttgaagaggtaatttgaatgacatgaagacttttcataattgttaatgttttatcataaatgcatcatttcattacatatatgatttcaaaggctttgtcatattctttaatctagttatatgtcttatgcacagatgtttattttatgggagtgtaacttaatgaaagctaagggcaaatataatttcatttatagaaatttactttccctaacaacattgagttatacttccataaattttattccctctcaactagggagggaggatgtggaaaacaaaacaaaacaattctggccttctaagttcttgaagatcaaagctgccatcttgaggagtgtctcctctcaactcaaacaagtggggacccttccagctgaggcccaggacacctttgtttgtcctagaatactcttctttgattctgccctgaggctacatctggggcactctaactgcccccttcagtctgtccccaagctacagggcaaaatcccatgggatccatggtgaaaccctaggctgggagataagactgcaacatgcaaaacagtcttctcagatcacattatgcctgaacacctgagcacttggggaaagaacaaagtaaaaagctagcatgaaggcagtttacatcaaggtaaagcttccagaatatatttcaagtcagcctgagcaatcaaagtgattggaaccactaaaataatttatgtcttcataggagttttcttgaaaagcagaagttccaaaagcaatgctgaaggcagtctagtgtgccggatgattctctggacacattgtaaaacaccacaagcagttagtgcaagggtgtgaaacacagcaccttttttgagttatatctggctgtttaaaagcatgattttgggaggaaagagagaagaggggatcaaaatgttttccctccttttttcagtgggagagcagagaagaaatgttggtcaagatgcccatggatggaagaaaaggtggtgggtggggggcagtggttaaggacatagaggggcaactgccttgagaaaagggaaacttagatggaaaaattaaaacttgaacttctgggggaacttactttgttttttaatctttgtatgactttctcccataagcctacccatttcccgaagtgatttgagatggattgttttcatccaggccagtcttggaatagggatgcccagcagggcccagggtctggcaccctctccttggccttaaggccagatacctggggtaagtgttgagtccaggccagaggtaggggtgaggtagggggagaagggatggtaacacctgctggtgctaaaggctctcatctactggccccatagagtttgtgtgtctgtttgcacacatgatgtgtgcacatacatgtgtatgtgtagggtggctggtgggaaccaactccttcattcctccacatgttctcccggggctctaggctgccattttggagaaagactcacctgtatttgttcttcctccactgaggaacacctctgccttcggtttattgctgttttctctggttacaattttggttccattgaataacattggccttaatgttcatttacatgagattttgcctgtatttgcctgcacatgtgtgtgagtgtggggggcacacatatatgtatttgcctttgtatcaggggaggtgcacctagtgattccctctgcattctacacctgtgagagaagatcccagctgtttcccagcttaaatttagcagggaggtaaatggaccctctgtgggtttagataaggtgtatggtcaagcagatgttgtttttccttttataacttgccaccgaccttctcattaggggctggaataaagtcatgagattatagtcttatgttgctaagaaggggaaacataacaaatctactagcattaatttatataccacgttgactcaataaaaatctttgtagatcttgaaccttaatcaaaggaataactcttatggtggaaaagttaggctaggtggagagcattcagtgtccttcagtcatacatagtagttatcacttgctgatcccaggaaaccggtaatgctttagagagaatggttgtcatggtgagtttgaattacctgtagctattcagatgagtatttggatagatagttaggagagtacagttgtggagcttgagaaggcagatgagggccagaggtgtgaatttgggggccattggtctgtgggtgatgatgaagcaatgaacatttgcaagattacagagggagaaatgagaggagaagctgcctacagtgagctgggatagaagcgtgggctgcacggatgcagggacccatgctctttgtgacttgtgagactgataacaaatatacacgcgccatgtttagtggagggttacgtggtctttgtaagtgttactgaaaatacatctatcagactggccatttcgtgcaaagatgaaagttcatagaattcaacttaccaaagatttactaactgtcaaataccatgttccatgccaacagagaaaaatcacacattcattagatcaattcttattcccaagaagtgagggagacagacgtgcaagcaccttactagaatataaggccaaatgaaatagggtaataacagctggagacagtgggaacttaacagaaagaaaaattcatctcaaagcggggcttcagggaagttttattgaaaaagtggagggctgactaagactccaacagacaaggaagtgaggggagagaatctgagagtgaggacccctctcagtctcaggctttctggtctaacactgagtattagggagatctctggtcattctccaagcgcagcctctaacttctacatgccaggccctatatgagaaaataagagcctccaaaatacaaacccctctccccaactggcagtgaatggtgacttacaacaagtactttccaatgatactctcaaacaatgaaaatgatacttcatggttccttaagcatggcagagagaaccaccagatcacataatgcaactcatctaatattcctattgaaatacagtgggaatcactttaatagcactgagaaaataccagtgagataaagtctattttaaaaagttttgttggctgggcatggtggctcacacctgtaatccaagcactttgggaggccgaggcgggcagatcacgaggtcaggagtttgagaccatcctggccaacatggtgaaacctcgtctctactaaaaatacaaaaattagctaggtgtggtggcacgcgcctgtagtcccagctacttgggaggctgaggcaggagaatcgcttgaacctgaaaggcggagattgcagtgagccgagatggcgccactgcactccagcctggcaacagagtgagactctgtctcaaaaaaaaaaaaagtattgttttagtagttgaaaaagaacaaaataataactgaccaaagccgaccatttttgtgaagtttattctggtggagacagtgcttgcaggccacatccactctgttcttgaagggagaaagaacaccagtgaaaagtgaagcattgctttcctcgagcttacatttttcccggcatgcacaatgtcgccagtgcatatgttgaggtctttgcgtttgaagcgtggatgctgtttagtccttactgcatatatttattatgtgagatttattttaaaagagtctgtgaagttggccatggtggctcacatctgtaatcccagcactttgggaggccaagctggacggatcacttgagcccaggagttcgagaccagcatgaacaatatattgagaccttgtctttataaaaattttttaaaaattagctgagcatggtggtgtgcacctgtagtcccagctacttgggaggctgaggtgagaggatctcttgagcccaagacatggagactctagtgagctgagattgcaccagcctgggcaacatagtgagacccagacccaaaaaataaaagagtctctcaatcttatatatggttctcccctctttgtatcaaatttagctagtacactggctaaattggaaatcaacctgggcaagatcttgtttcttttcatgctgtctccccaaaagttaagtgctaatcaatttgctgacgtaacaaaagaagcaatcagaatatgatataaatattaagtagaatatcttttcctctctcaagccttccttggctatcttagacttaatagttctcttctttttactggttttgtgctttctaattacaactgttacatatcatgttgggtaataagaattcaattactgccatctttgacctgagtgacctgagggcatgagctctcttgttcattagttccagcacccagcctgctgatagacacatagcatgagctccatgattcctcataggaagattggagtactgtagaaattatagcatcctaaaaacccatttggattttctaatgccattcttctctatattggtcaacctgctggagactatttgtgaatacaaattatgttcccaaatacatcctagtccaggtaagacaatgccaaacatagcttggaggagctgtcatctagtgggaaaaattaatggtctacataccactgggtcctagtcctggcattgtactacaatccttgcagctgaaggtggttttttttacctctctaggtgctgcgttgccatctttaaagtcatcccactggaccacatcagtattgcaagctgcttgggtatcattaatgaagacaaagtgggattattattttctatgatttgggcttttgtgagtttatttattaatgtagtctcaccatcacaccccctcttttttttaaataggcatgccatattactgcattgtagtaagcttctgactaattagaatttctggattattcaaattgaactgctgttcatattttatgactttgccatgtactttttgggacctgaaaaggtcttcacaatgacccagttaaatttaattctgttagttttatctagcatttcactggtgatgatacatttgaatcttgattctatattctatcatattagttatcctgcccactttagggtcatctgtggatctgataaatgtgttttctatatttttgtctaaattattaacttgaattactaactagaacagatttaaggacagacccctgtagtactttgtgaaagacttttttgctggttgataaatgattaattaacaccctggttttacttgtttataactacagtcatgtgttgcttaatgactggcatatgttctgagaaacatgttcttaggtgatgtcatcattgtgtgaacatcagagcgtgtatttaccaaagctagatggcatagcctaccacacacctaggctgtatgcaatagcctattgttcctaggctgcacacttttatagcatattactgtactgaatactgcaggcaactgtaacacaatggttaagtatttgtgtatctaaacatatctaaacatagaaaaggtacagtaaaatatgatataaaagataaaaaatggcatgcttgtataaggcacttatgaatggagtttgcagggctggaagttgctctggctgagtcagtgaatgagtggggagtgaaagtgaaggcctagtaatgattgttcactactgtagactttagaaacacctacacttaggctacactacatttataaaaatatttttcttcagtaatagattaaccttagccttctgtaactttttcactttacaaacttctaaattctttatactttttactcttttgtaataacacctagtttaaaacacaaacacactatacagctatacaaaaatattttctttatttatacccttattctataagttttttctatttttaaaattttgaatttttatttactttttaaacaattttttgtacaaactaagacacaaacacacacattagcctaggcctccacagggtcaggataatcaatatcactgttttccactgccacatcttgtgcccctggaaagcactgaggcaataaaaggcatggggctgtcatctcctatgataacaaggctttcttctagaatatctcctgaaggacctgcctgaggctttttcttgttttcacattagtgaagacactgaagatgtcactaggcaataggaatttttaacctctattatagtctcatgggaccaccctctctctgtatgtgggctgtccccgaccaaaacgttgttatgcagtgtgtgactgtagttgtaagtcaatgctactggactagctatcagtcaatcatatgcttataaagattccaatcctacctggctcaagaatttcagaggggacttactgagttggactggttttaatttgtactacttgaaaattcaatatcaatctaaatgtgaacttcccctacaggagtaatcaagacaccccagggggccctgggacccctttgtcctccagtacaggttctatgagtttgcaggatcttaaaatttgtgtatgtaaggcctcgaagagctcggctgcctggttctgtcctgtgttcttgaaacaaaactgactttggggcaaattagaaagtagattcaaattatttcattctagtttgatggcagctttcccttcttctgtgacacatcttcttgctattggaggtggctggggtcttcctggtttcttccagcttttccttttctgtccctcactagcgaggtcacacactctcctctggacttctctcttcttatcaagagtttgtgtctccttttcattcctcggtgaccattgcatgtggctaggtaatagaatggaggtacttgcttgcacaagtgcttgtgtacacaaacatacagagatacacacacagacacaccacacagacatacgtctacaacagaaatacataaagatgcacacagagacatacatgttcaaacagacatacacacagacaccaagacacacacagacacccacacagacatgcaggcacacacatgcctcccccaccacccagacatacatgctgagtcactgatgggctagggaacctctgttctcccagccacacgcaatctctgagaattgcccttgggctaacgtccacaccaccctgccaggcccattttcctgttgtagatgaagaaagagcagggctggcctcgtgggcgtgtgactgtgcctacagttagaagggtcctgtagttgttttaatgctctgctcttgtcaccttgaaatccgtaattccttttgaacaagggatcctgcattttaattttgcactaggcaccacaaattatgtaaccaattctgaggaggagttatgtgttccgtagtgtgatttacctgtgcactatatctggggactccgtctgcatgctagcagctgctggaagagtctatttcacattaattttcctgctgcatattttccaataaactatcttccaataaactatcttttaaagctgttaacaagtgttttctaagaaagttcactcaagaattcaccctgatggaactatttgttttactctcctgtggttgtaactgcccaatctgttctccttgcctgctgcctagacagagccaatttatcaagacaggggaattgcagtagagaaagagtttaattcacacagagccggctgtacaagagactggagttctattattactcaaatcagtcttccaaaaaacgtgaggattggggtttttaagggtaatttggtgtctagggggtcagaaagtagggagtgctgattgatcggatcggagatgaagtcacagggagtcgaagctgtcctcttgagtttgttcctgggttggggcggcaagaccagctgagccggtttattgatctgggtggtgccagctgatccatcaaatacagggtctgcaaaatatctcaagcactgattttaggttttacagtagtgatgttattcccaggagcaatctggggaggtttagaatcttgcagcctccagctgcatgactccaaagccataatttctaatcttgtggctactttattagtcccacaaaggcagtctagtccccaggcaggaagggggtttgttttgggaaagggctgttaccctgtttttcaaagttcaactataaacgaagttcctcccaaagttagttcagcctacacacaaaaatgaacaaggacagcttggaggttagaaacaagatggagtcagttaggttagatagcgttcactgttattttctcagttacaatttttgcaaaggtggtttcttggtcacagttgtctccaattctgattttatttaattttaatgtccatatgatacctactttttcttttttctttttccttttttttttttttttgagatggagtcttgttgctctgtcacccaggctggagtgcagtggtgtgatcttggctcactgcgacttccgcctctgaagttcgagcgattcttctgcctcaacctcccgagtagctgggaccacaggcatgcgccaccacacttggctaattttagtatttttagtagagatgaggtttcaccatgttggccaggctggtctcaaactcctgacctcaggtgatccgcccacctcagcctcccagagtgctgggattagaggcatgagccaccgtgcccagcctgttctctaatttttaaaaactccaaccagaacataagtcatgaaaagatgcagcaaacatttgagagtcaacaaatatttactttggacctactaaatgctgaacactgttctagagtctggggatagagcagagaatataatagcatccctgaccttgtataacctacattctggtgaggagagacagaccataagccagcaaaacagaagtaataaactagcaagcatatagatgagtgagaaaattgcatgcatagacaaacgctaaagagaaggttaaatagggtgatgtggtagagggtgactggaggtggttttagcttggtggtctgaacaggtctctctgaggagttgacttctgagttgagacctaaatgatattctgggtaaatgtagttttggtagggctttaaagtattagctgtagctcaagcatgttcactgtttttgtgaactatgacatccatttaaatgatgttcaaagaggaatggtgggacatctcaagtcaaacaaacatcctgaactcagtggatgaagtctccaacaggtttcactccagggcatttccatgaagttccacctctccttcactttgctgtcaaggcaccaggctttgttgtgtgccctgtagggggtgggagtggagcactttagtaggagtgatttgtagtttcagcgaaagtggaagcttcagaacctacccctccaatttgctgaagaaggtgggacagaaccaaggaaaggcaataaaaccgtgaaccacagaaacacctgcatcaccaagtacatgccccggggccaaaagggatgttagtgccactgggatcagatgggatcaatttctccatgtgcactgattcagtgcttgctacactgcttcaagctaacctcccactctcactgtctccatttcagaacccagttccttttccctctttccgttcatttcgagaagacaatgtcagaaaacagaatgacgtatgtgtccaaaggctcaagggcttggcaagcgctggctctagtttttagcacttaattgacaattattcattgcctcttgtgattatttaattacacccccaactgaacttaccattttaccccagtgctcctcctctgacttcaccattctattcttccttctttcaaatcctgaccagcaggtcactcatttgcaattcctacatatttaaagcaacgttcactctcccgatttctgacctttcaaacacccttgtaactaagtccttgtattatattccatctgtttgaaatttatggtatgacctctggtttcttgattgtgtgataatgtaagcgatttctttcttcaatgacttctttcttttttacaattgtgatatatacttttatttctcattgataaatggttacaaatcatactcctaggtttatatagcactaacacttaaacacattgtaaagcttctggaaggcttataataccttgtgtcttccagctttatctcccagactggatctcatttttttctttctacttttcttcccttttttttcataaaaattgtatatatttaaagtgtacaacatgatgttttgatatacatagtaaagtgattactgtagtcaaaataattgattatccaccacctcacattgttccttttttgtcttgtggtgagagcaattgaaatctactatattagctaattcccagtacgcaatacaatattgtcaccattctgtacatgacatgtctagacttactcatcctacacaactgtaactttgtattctttcaccaatagtgacatttgtttcttgagtcatcaatttctttcctttttttcttaacttttatttaggttcgagggtacatgtgaacgtttgttacataggtaaactcatgtcacgggggttggttgtacagatcatttcatcactcaggtattatgctcagtacctaacagtgatctcttttgcccctcttactcctcccaccctccacccttaacagaccccactgtccattgtttccttctttgtgttgattgatcaatttaaaacactttttattgactccctgccatgagtagaagcttaagctacttacacaacacccgtctgtcccctctcttccaaattttggtaatcattattttaatttttcagtgtttctttaaaaaatatacctgtaaacctcaaattttgtgcaatcaactttagagatggtctcttgactcctcaccatgttagatgagaccatccatattcttatccttccttctaactcttccatattatcccgcctcccatcttctgactatgaactttcatttctttaattatcaaagttgttaacattgacattttgttctataacaatttaaaatcttgtatagtagatggattctaaagctaaaagctattttattattatgcgtgagaataacatgttgccatttcacagccaaaaattatattttctaagattgtatttccacaagctaaggttatgttttcttctctttatgtctagcatcacaagctcttgaccctcaagagacactatgctcactatacaggtcaaaaggataaatgctttttattttcttataatttataaactattcaaaatcacgcagtattttagtattttagtttgtttcgtatttgggccatgatttttttaagatagtgtttttcttggaggttctaaatgtgaattcgttattgagataggacacttctttctctctctcttttttttttctttttttcttttttttctttttaccatgtcactaataacaagcatcattgtcattctgtacatttgtacattgcttggaagctgtaagttttttcttggacataccatacatggaatgtgctgacatcctgttccagttggaccaattgctttctcagcctcacacacagatatcatcctagaatttctttttattggacacttggttgagtttcattcttttttttttatttttttttgaatttcactctttgtgtttagctgtcatttttctggagtaaatcctcaagtaattttctcataaaaattgcatagagggtaaacactctgtatattctctgtgcaaaattgttatgatgatgtatgtaggcattgccattttgctctgcttagatggtcttccttctgggtatctgctataaaaggaaggctgacttgagctctgtgtttgagggtggaatatgttgattgtcaggcttcactctatgggaagctggtagggagtcagcctttagacaaagaggggccttggcattcttgaatgaggagggccactggagtgtcattgtctcctaagcagccttaattcttcccaggaggttgactgcacttcttgagagaggagtcctctagttgctgttttgtctgggggagatgaaggtgaagacagatgtccagtgagcctctggctttgttctcctctttgccatgcccatgccaggcttgccagcaaacagcctgcagggctagttatcttccttctgtgtggctcttctcacccttctctcagtgtcactcatcctcacttttcatttgctgtcttctctactcctcacttgtttgcttctcatacaatgtttaagcatatttctgctttctttggtgataccctatctgatgtcatctgcctctactggttgcttatcttcttattttttaaaatgtcttttctgttttcctccatttttcctataacttgagacagattttctcaggcaagaacacgtgtcattgccctaatgggattctaagcctgggcatggcgttaaaggtggcttgtccaaatctccttggtacgggtgaaggcactgaggactcaggagactgagttgtccatgttcacacagctaagctcatgacagggccagggctgtgtccagctctcccgcacgtcctgcctgtgcttactccctagattgcagatttcttcctgtgcctgggagaattcatgtgaaattttgtcaccttaagtggaagatctgtttatgatgaaaagtgccctttagtgtaagagattccaaaaggcaggttcttagactatgttggatagatgtagtagcaaaattttaggacttcccatagctccaaattattaaacctttgtgtggaaataatagagtttggggattagagatacaaaaggaggatgaagaatctgcccttattgaacagccctgctaccgtcatagttttcttcttgtttgacctgatttaacagtgaagcaagctctgatgagacttatggactatttgcaaatgattgcaaaactgcagccctcccagaagctggattttttttttctgtttagtttttttgtgtgaccttgtgacagaattatatggaagtagaagttagtttagtgttattcacatgtgtacacttttgagaaacttcgtgtggagaacctgactgagatactttgcacaaaactgttaggaacattaactgaattaaatggtggggggaatgcatctgttttataacaggtgccggaaaatggactgtcaccaatattgtatagtcaaggatggaagcaggaggataatagagttgcagtgcgtatgctaaacaaaagacgactttcattccaaggaaatgagatagagacagcacgagtcttacttctgttgttttccatggaggaccttgacaggaagagcaagttttgtctcagtgatgtacagagttgatctttaagttgcatgacaacatcattatcttgctctggcttaaaaaaaaattatcagctttgggaacaattgtctcttaacagtaactcagattttaggtttctccttccctgccagcccagggtgatatgaacattttgaaaaaactagaggtagctttttatcagtaaaaaaaaaaaaaaaaaaaaattccctcctgcacatttgtttcttgaaggacaggtttctgcttctatctttttgttttctaggttgaggatgatgaatggcagtttccaaatgtatttctgaaaaagatgaataagaaagagctgtttctgattcaaccttccaattcctgggagaaatggatgaagtaggaagtagagagagctgtagattacagaaaggccaacatgaggagttgcttttcttgtaaatgtgtttcatttagaaggcatgtgtgcttaacaaaggatttaatttgtgtggaattaaaaaaaaccaaacttttgacaatacatgtgaacaaaacttcaaactgcaccaaattatttacaaattttcagttaccgtctttggcattctagctggattattccacctaaaatgcagatctaactttgttatttttctgactgcagtcttgtgctgctccacaaactcctaagcaatagtgtatgagccctttgtacattgccttctctctctgtccgaagtcttattttccaccctccctgcttgacacctgatgcattatactctagtggttccttcatactctgctgctctgcacttcacaaagatccttctctctggaatacccttcctatttttatttggccaactcttactggataaactatcattctgtcctgaaagtcttcccttaaactaggtgggactaagacccacttttctagactctgtggcttctggcttgctactgagtatcttatatttctctttaggtgtgagttgaccttttagactatgagcgtcttgtgagtggagactatgccttattcatttttgcatgtgtcgggtggatgcagtgctgaacatgtaatatgtgcacagtaagtgtttgccaataacctctaaatatccaactcaactaatatttcagttacttcctatttagtactaagactgaactgaaaacccacaagaaagtttcataatgataggtggtaaatagcagttagttcaggaagtaagtaacagattattatttttctcccagtggcagggtcacactatttttaatgaatttggataaatctacctgtgcaaagcatatgtgtccatacagcaagtgcattaggaatcacagataatacttagaatcaaggactataagaattgcaaaatgtccttagatatcttccaggccaatcctctttgtgatgcaagagtccttcccacaatagttctgataaatagtcatgcattttctacctaaacacctcctgtaatggcccctctttatctcaccaggaagctcaatccatttttggaccactttaattttcagaatactttctatattggctcaaatctacttcttataacatttatccattggtcctgattcttcctcttgaagaggaggaagacaataaatctaatttctcttcttcctttaaccttgcagatattggtgcatcatcaaatgtcccgtaagacttctcttctccaagtgaagttttcttaagttctgtaattgttcttcatattctgtgcattctgttccccttactatcctagtcactctactgtgctttagtttgtccagaagtgaacacgagagtccaggtttccttatcagtgcgcatttgagcatgactgggcccacattacaatgaacactctactttagtttctgaagcctgagatttcattaccttttttttggcaaccatgaaactctgctgacacatatggaactttcaattaataaaaacctctaggattgtttcccttgtactgttactaagcctttctgggatctggttatactgcttataccctctgaatgatgctacatgaaaaatttcaaatcaacaaccattgaccaactatttgataatattcatacttgtagatcaaaactagaatgtaatagtgcccatacctgaaggtctaaaaagtactttccgatagttcttattatatttatttatttttctctgggcatgaagacaatcagattatagtcagcaaacaatttaaagactaaaattttcataatttatctatttatatcagtattgctatttagaacactgaccctgcaaagttatatacctagtccaacaatgctttctttgttgggtgattaggacaataacatttttgaggggtgcctacttagtgcttagtattcaaaccatttttcaaacttcaactttcgaattacatttaaacccagtgcatgaaccacacagaaacattattctcactattttcagtcacatttcttcttttcgagtccaaggttctagtttagtggtcttgtctcctatgacctttagtcacctcctgaaatcaattatatcctcaatgatggctattactccgttcccccttgaatatattactacatgtccccatgcaggcccctggagcagtcgtaccactcagatggcccaacagcctcaccaatgtcttgcctgcatcctctctgtttaaaaataggactcccagagattctaccttgaggccccagatcctgccaaaaagagatttgtttcctcctctgttcttagaccaattaccaaataaagcactccacagagaatccagatgaaatatttctccacccagttggtaagaaaagtaattaaaccaacctgctgtgctgagcaggcctgcagcaatgtaacacttagttatagcaacagccatagataggaactcagctgcaggctcctgtcagaccgatctgggcatttctaaccactgtccttagcaacgttcacaaagggccccgtcttagactcagaaaggcagctcacagcccttaggggtatggtttgaggtaaaataaaaaaataaaaaatttaaaagcatgcattaagtgtgcttctcagtctggctgtttgcagagcttagataaataagaataagggcctacctagctggatctagcatttgcttgctctcagaagttgcagtgacaggagaagaacttttgtttggccagatgtagcctttgctcttatcagccactctttcccacccttgttggtaccatgaagtttaggtagcatatgacgtctcctaatagaaatcactacacattctgtaatctgcagttcttattcagggcaattcaaatcactgtaatttctttctactaaccagattttgctgaaattctggaaaactatggaatactttttttttgtttgaaaaatcaagcaacacatatttcgtttcaaatggtagactgaacgaagtagtataactcattttcctatgtcatcgcataaaatttggttaaaaatctacttaatctttctcatattattagcaaatgaaaaggaagaagaaatgtcaagctgtctagctgcaacaaggaatatatcgcattttgtcaataatagtaataataatgatgattgtggggctgatgacagtaatgatgccatgggtctctttagctgggaaaattgacacagttgcatagactagaggtatgcaagaagttagtctgagtaatgtaagttttaaaattagtgaagcaagaattttaatgattttaaaaagggtagtactaatactgtgtatgtacaaagcactgtgaaatgtataaagcattttcacatttcaacaagggatattgaatcgatattccataagggatattgaaatgtgaaaaatcccttactgaaaagggatttttcattaagggattttggaaaaggaggaagcagtgttcagatggattaagtggcaagacctggatttgctgttctgtgtgccaccaattctcaattcagtaaaactgactcagtcaatccaagttttcctgatttggtagatttataaaagcctatatattgagctcatctgtgacatgcagactgtttcttaaaaaaattattttttattttaatggtttttggggaacaggtggtgtttgaatacatgaataagttctttagtgatgatttctgagattttggtgcacccatcacccaagcagtgtacattgtacccaatgtgtagtcttttatccctcactctcctcccaccctttcctccgagttcccaaagtttattgtaacattcttggttttccattcctgagttaattcacttagaataatgatctccaattccatccaggttgctgtgaataccattatttcattcctttatatggctgagtaatactccattatatctatatatctatatagatatataacattttctttatccactcattgatggatggacatttgggctggttccatatttttgcaattgcaaattgtgttgctataaacaggcatgtgcaagtatctttttcgtataatgacttcttttcctctgggtagatgcctagtagtggaattgccggatcaaatggcagatccacttttagttctttaaggaatctccacactgttttccatagtggttgtactagtttacattcccaccaacagtgtgaaagtgttcccttttcatcacatccacaccaacatctatttttttttttttaaatgttttgattatggccattcttgcagaagtgaggtggtattgcgttgtggttttgattttcatttctctgataattagtgatgttgagcatttttccatatgtttgttgacaatttgtatatcttcttttgagaattatctattcatgtgacatgtaggctcttgatcctaatggtgacaaaaatatctgtaatggagatgatatattaatatttttcagatatatttctattataaattttggtatcttgggggcttctcaattattgaaacaatgagctcaaaagaccaatgtaaaaagcttttctaaatctctgtagcctctcagtgatatggtctggaggactcagattatttagttttttctagaaatgttcagaagattcctgctctgcctctgtaggctgaaccaaaggtcctcctggatagaagaaagacatgatgttgaggaaaatgaacagttttcccttctattctgagaagattatggaaataagatggtcaggtgtcggagcccttgtttttcttttcttagggtccaacttgggatagggaagggactgtgggtttagaaagcagtatctgtattggtatggatggtctgcagaaacctttgctcctttgagctactgtagtgaagactcaagcccttagggaaatcataggtgtaggcttggcaccgtggccatcatggtgcctgagtgagtgtaggtggtaccaggagcccaggtctgccattctggaccccagggacttatgtaactccaagtcccaaggaggagaggtggagatgctgagggccctggtgaaccagcagaggccctcatgcaggagagagttcattttgggtgaggacttaaagatgagaataaatagctcggatcttgggttccagcagtcggtgccagcacatgatctcaaatggccagacaggtccatttgttcctctgtggtcagcagttcagggagaaactcagtctggctcctctgcagcagaggcccagtgagaattcagatgaccaggtgaagctctgaggaccccctttcttcctctatcacgccatcattaatgagcgtacctggcccctccaaccagtcaccttcttgaattggaggatggggagggaaagattttacacaaatagatcaagcaattaattaaagagactgccataattattgcatcagatcaaggttgatggattgaaaaagcattttatattattttttccaggtttgctctgggggtttaggctttgtgaggatgatcagatgagttacgtagagaaagtagaaatttccatatttgatcaaatttaagatacaattgattattagaagaacctttgttttatcaattactgagaaagaaaaaagttaccatattagtcagggttcaagcaaagacatagaactagtaggagctatgtattaagagatatattgcaaggagttggcttatatgattgtggggggtggttaggcaagtctgaaatccaaagggtaggtcactaggaagggcaggctgagactcccaggcatgagtccataggcaaaattcctctttcaccagggaagtctcaactctgcacttaaggctttgcaacagatcgaatcaggcccaccaaaactgtctaggataatcttccttacttataggcaactgattatggactttaatcacatctacaaataccttcaatgcaacacttagattagtatttgattgaatagctggagactgtagcctagtcaatttgacacaaaaactgaccatcacagctaccaattaaactatggcaagttctggtgagacatatttcaattttagaggtgttaaaatgtaaaaaaaatttagagtttatgacatgtggtacattttctgggtatagcgcaagtaattgagaactgtattacctaactttatttagtaattctggggattagtagtgattttgtaatcttgtaatgacttgtaattctagagattggtagtaattacaactacccctttgcagagagaaagcctgagtaccaagaaagggaagtcacttcctgaggattacatcaggcagggctagaattaggatcctgttttccacccccatgttctttcagtccagatccctgtattttattagaatcacaggcaaagaagattggtggaatgtgaattgtgtttccctggctggtgtccctgatcacctgagagttccaaagtgtgtaaaatgatttcgtggagcctgatggaaagtctgcatttcatctgaggcaaagtttcatgggctaaataagatgttaagttgctttgcttttggccagagttttatgtagtccctttggtcacttttctgtcatatgctcatcagaagctgtgatgaccagttatttaagttgtgtgggtcattctcctgcttcctctcaagttcattctctaccttccctcattttgcatcaaagggaattaactttcctagggttacttgccaatgacttctgagtagcttcagcgaatgggaggcaccagaggaagcctagagggtgggagaagggagaagccagggagtgagtggctcccttcttgctctgccctgggctgggtctccctcagtggctgtgtttctgcagtggctctaactttgcttggatagtcactgcctccacagtcccatcccaccaggcagcctccaccatagttctggctcccactgatggtcgtggcttttggaaggcaatagcaacgtctcctctcattgttccttcggctctaggaatggcaatggctttctgctcttgtctcgccactccttagggactctttcaggtctcccatcacttgcataatgaattcctcatagcaaatttcctgtatttggaatagctatagtggtcccatgttcctgatatgtaggattaaaaaattaattattctgggaaaagtaaatcagttattacttgagagatacacatttgggtagataccatcattcaaaacatggcttctgtgttaggctgtttttgtgttgctataaagaaatatccatctgggtaatttataaagaaaagaggtttaattggctcatggttctgcaggctttacaggaagcatgtctccagcatctacttctggtgaggtctcaggaagcttgcaatcatggtataaggtgatgggaagccagtgtgtcacatggggagagcgagagcaagaggtagggggaaggtcccagacttttaaacaaccagatctcatgtgtactaactgaaggcttccttgcaattccttaaaaaagaatagaattgattgccatttgagagcatgtggactgtttgaagggagggctagaatttgctgttcaatgtttagcacattctgggagcctagtaagcactgattcgaggaatccaagtcttccagactcataagccattcgtgagtcatgttatcaccaaggaaatggagctaaaccattcctgagggatctgcccccatgatccagtcacctcacaacaggccccatctccaacactggggattacattttaacatgagatttgggggggacaaacatccaaaccatatcagcttccaagaggaaaaatatgaaaaagaagaaaagggaccttggcagtgaaagggctgtagaggcacatatggtagtgctgaagggagccttagcagccaccagagaaataggggtacttgtcctgggtcacttagcagttcataaatgaacaaccaggaccagaatgcagttgtttttgcctccagccacatattacatagcacagttggaagcatttggaatcagagagaaccaagttaaaaatcccagctccactgtgcgtttcctctgtgacttcaggcaagcctcttactgtctctgaatgtcagtgttctcatcttgaaattgaaactaaacttcccagtgttcatgaaactgtaaggagtcacttgtaagtgtacttggtggagtgtttggccagagtagccactaaatatgttacatttccttcctcccattcaggacttttctataacactatccaggaacaattaaaatttccaagaaggtagtttctttcttttttaaactttcttaaaatctctgccttccccttttgctgactttcaacaaagcaaaataaaggagctgaccaaatgctttaataatgtaacttggctgggcacggtggctcacgcctgtaattccagcactttgggaggctgaggcaggtggatcactgaggtcaggtgttcgagaccagcctgaccaacatggtgaaaccccgtctctactaaaaatacaaaaattagccaggtgtggtggcaggtgcctgtaatcccagctacttgggaggctgaggcaggagaattgcttgaacccaggagatggaggttgctgtgagccaagatcgagccattgcacttcagcctgggcgacagagtgactccatctcaaaaaaacaaaaaacacaaacaaacaaaaccctcaatgctttaaaaaaaatcttgcaattccttaaaaaagaatagaattcattgccatttgagagcaagtggactgtttgaagggagggctagaatttgctgttcaatgtttggcacattctgggagcctggtaaacactgattcaaggagtccaagtcttccagactcataagccatttgtgagttaaaacaagcctcctttgaagtgcttggacatccttctctacactatctttagttgccattttgccccttacattacagtaagaagtacatttgtatggagttatacatgccacaggcctgctctaggacacttggcaatcagcaatcgttcagacctgctttccttcattttccttattggttccaggttgaacataggtcttgttaccgttcaagggcctgctcctatgggcccatgccccaggagccctaagccttttggcccagttgaaaagctgagttacatgagaaggtgacagcctcataatggcccgtgttccagccccagcattgttaccccctacaatgctgttgtaggagtgtaaagaagcagtcgcttagactcctaaatgcagttcttctctctcgagaccaccttggattggagaacacccaaatgagcaggattgcttttgctttcaaaagagtgatacctggagcacaggtatccacctccccccatatcccatgctttgaaaactatgttgtattagtgttttattaactgtgcttgaatattgggcatcctcctatattgcaccttgatattcttggctgtatataaagagttgcttcacttttaaggaaggtggacttaaaagtttattgtttgtgttgtgatttcctttcaagtagttccactctgtgtaacaatgatgcaaagcaggcggagagctgacctagggctttcaagtggggcagaggtaagcaaagagatttttccctgattaatgctatcagtttaattttgttgaataaatgggtggaattaggttgaggagtgtaggttcttgccagatccaccagaaaaggtggtagatatagttataattagagtagtaatcagaagggtttaaattctgtgcagattgctttaactctccattttaacatgttttttttttttcttccctagcagattaccagaaatggggtttcagaaatgcagttctaagcatgacctggggtgatggggcgcctctatttatggcaaatggctttgacttctgtgggactgggtcatattgttacagctgcaagactaaaaagcatttgaatgattatattttgattagaattcttcctacacttttaaggaacatggaaacttcagtctctttttctctctcaatctctctctttactttctctcattctatttctcttctactttcccacatcccctttttggagactgtgttgtactaatcttttttttcttttaattatactttaagttctgggatacatgtgcagaatgtgaaggtttgttacataggtatacacgtgccatggtggtttgctgcacccatcaacctgtcatctacattaggtgtttttcctaatgctatcccttccctagcttcccatcccccgacaggcctcggtgtgtgatgttccccctccctgtgtccatgtgttctcactgttccacttccacttatgagtgagaacatgtgctgttgggttttctgttcctgtgttagtttgctgagaatgatggtttccagcttcatccatgtccctgcaaaggacatgaactcatcctttttatggctgcatagtattccacagtatatatgtgccacattttctttatccagtctgtcgttgatgggcatttgggttggttccaagtctttactattgtgaacagtgctgcaataaacatacgtgtgcatgtgtctttatagtagaatgatttataatcctttgggtatatacccagtaatgggattgctgggtcaaatggtattgctggttctagatccttgaggaatcaccacactgtcttccacaatggttgaaccaatttacactcccaacaacagtgtaaaaacattcctatttctccacatcctctccagcatctgttgtttcctgactttttaaattattgccattctagctggcatgagatggtatctcattgtggttttgatttatatttctctaatgaccagtgatgatgagcttttttttttcacgtttgttggctgcataaatgtcttcttttgagaagtgtctgttcatatcctttgcccattttttatgggtttttttcttgtttatttaagcatttaagttgtttaagccatttgtttaagttccttgtagattctggatattagccatttgtcagatgggtagattgcaaaaattttctcccattcggtaggttgcctgttcactctgatgatggtttcttttgctgtgtagaagttctttagtttaattagatcccatttgtctattttggcttttgttgccattgcttttggtgttttagtcatgaagtctttgcccacacctatgtcctgaatagtattggctaggttttcttctggggtttttatgagtttaggtcttacatttaagtctttaatccatcttgaattaatctttgtataagttgtaaggaagggatccagtttcagttttctgcatatggctagccagttttcccaacaccatttattaaatagggaatcctttccccattgcttgcttttgtcaggtttgtcaaagatcagatagttgtagatatgcagcgttatttctgaggcctccattctgttccattggtttatatatctgttctggtaccagtaccatgctgttttggttactgtagccttgcagtatagtttgaagtcaggtagcatgatgcctccagctttgttcttcttgcttaggattgtcttggctatacaggctcttttttggttccatatgaaatttaaagtagtttttttctaattctgtgaagaaagtcaatggtagcttgatggggatagcattgaatctgtaaattactttgggcagtatggccattttcatgatactgattctttctatccgtgagaattgaatgtttttccatttttttgtgttctctcttattttcttgagtagtggtttgtagttctccttgaagaagtccttcacatcccttgtaaattggattcctaggtattttattctcttagtagcaattgtgaatgggagttcactcatgttttggctgtctattattggtgtataggaatgcttgtgatttttgcacattgattttgtatcttgaggctttgctgaagttgcttctcagcttaaggagattttgggctgagacgatggggttttctaaatatacaataatgtcatctgcaaacagagacaatttgacttcctctcttcctatttgaataccctttatttctttctcttgcctgattgccctggccagaacttccaatactatgttgaataggaatggtgagagagggcatcatccttgtcttgtgccagttttcaaagggaatgcttccagcttttgcccattcagtatgatactggctgtgagtttgtcataaatagctcttattattttgagattcgttccatcaatacctagtttattaagagtttttagcatgaagaagtgttgaattttatcaaaggccttttctgcatctattgagacaatcatgtggtttttgtcattggttctgtttatgtgatggattatgtttattgatttgcatatgttgaaccaggcttgcatcccagggatgataagctgacttgattttggtaggtaagctttttgatgtgctgatggatttggtttgctggcattttattggaaattttcacatcgatattcatcagcgatattggcctgaaattttcttttttgtgtgtgtgtgtctgtgccaggttttggcatcaagatgatgatggcctcataaaatgagttagggaggagtccctctttttctgttgtttggaatagtttcagaaggaatggtaccagctcctctttgtacctctggtaaaattcagctgtgaatccatctggtcctgggctttttttttttttggttggtaggctattaattactgcctcaatttaaaaacttgttatttgtctgtttaggggtttgacttcttcctggtttagtcttgggagggtgtatgcgtccaggaatttactaatttcttccagattttccagtttatttgcatagaggtgtttatgatattctttgatggtagtttgtatttctgtgggatcagtggtgatatcccctttatcatttcttattgtgtccatttgattcttctctcttttcttctttataagtctgcctagcagtctatctattttgttgatcttttaaaaaaaaccacctcctggatttgttgatttttttgaagggtttttcgtgtctctatcttcttcagttctgctctgatcttggttatttcttgtcttctgctagcttttgaatttgtttgctcttgcttctctagttcctttaattgtgatgttagggtgtcgattttagatctttcctgctttctcctgtggacatttagtgctataattctttctctaaacactgctttagctatgtcccagagattctggtacgttatgtctttgttctcattggtttcaacgaacttatttatttctgccttaatttagttatttacccagtagtcattcaggagcagattgttcagtttccatgtagttgtgtggttttgagtgagtttcttaatcctgagttctaatttgattgcactgtggtctgagacactgtttgttatgatttctgttcttttgcatttgctgaggagagttttacttccaattatgtggttgattttagaataagtgcgatgtggtgctgagaaaaatgtatattctgttgatttggggtggagagttctgcagatgtttattaggtctgtttggtccagagctgagttcaagtcttgaatatccttgttaattttctgtctcgttgatctctctcatattgacagtggggtgttaagttttcccactattattgtgtgggtgtttaagactctttgcacgtctctaagaacttgctttatgaatcttggtgctcctgtattgggtgcatatatatttaggatagttagctcttcttgttgcatcgatccctttaccgttatgtaatgctgttctttgtgtttttttgatctttgttggtttaaagtctgttttaccagagactaggattgtaacccctgttttttttttttttttttttttttttttgctttccatttgcttggtaaatattcctccatccctttattttgagcctatatgtgtctttgcacatgagatgggtctcctgaatacagcacaccaatgggtcttgactctttccagtttgccagtctgtgtcttttaattggggcatttagcccatttacatttaaggttaatattgttatgtgtgaatttgatcctgttattatgatgctagctggttatttttaccattagttgttgcagtttcttcaaaatgtcgatggtttttacaatttgatatgtttttgcagtggctggtaccagtttttcctttccatatttagtgcttccttcaggagctcttgtaaggcaggcgtggtgctgacaaaatctctcagcatttgcttgtctgtagaggattttatttctccttcgcttatgaagctgagtttgactggatatgaaattctgagttgaaaatacttttctttaagaatggtgaatattggcctccactctcttctggcttgtaggatttctgcagagagaaggagaagtctgatgggcttccctttgtgggtaacccaacctttctctctggctgcccttaacattttttccttcatttcaaccttggtgaatctgacaattatgtgtcttggggttgctcttctcgaggtgtgtctttgtggtgttctctgtacttcctgaatttgaatgttggtctgtctcgttaggttggggaagttctccttgataatatcctgaagtgtgttttccagcttggttccattctccccatcactttcaggtacaccaatcaagtgtaagtttggtcttttcagatagtcttatatttctggaaggttttatttgttcctttttattcttatttctctaatcttgtcttcatgctttattttattaagttgatctttagtctctgatatcctttcttctgcttgattgattggctgttgatacttgtgcatgattcacaaagttctcatgctgcgtttttcagctccatcaagtcatttatgttcttctccaaactggttattctagttagcaattcctctaaccattttttaaggttcttagcttccttgctttgcgttagaacaggctcctttagctcagaggagtttgttattacccacttgctttccattatcttatttaagcaatgcaacaacattttgagataagaatttatattagtgtatgggacatatagatcaagtgcttagcacacatgcccatatacatgtacacacacatccccatgccgctgatagaatttttcaatttaaataactgaaatggcagtgaaataccccaattttcagcctataaggctattgggcatttttgttttggcatggcaaaataatcccaatatagcccatctttcccactgattacaactataaactctggacaaaatacaaacaaaacaaaatactatctgaggattttgaaaagtaaaccgaaacaggcagattgttgaagagggtcaaaacttggacaagtaaccactggtggtgagtttcacattttttccattctttcttaacagctgtacccaaagggttctcattatggagcagcgagggaatggtggcagcgtgggcagataaaatctcaatagaaacccagtcctactggctagagtaactaagaaaaggggctctagggggatggagagtgaggagagaataccagagtggagagaactggagaaaaaattcccaattctgtatatgaatctgcacaagtctcaggctcattctcaaagaaaaagaggagtaatagatgcaactagcatagtacaggttttgacaaccaaactgaggtttgaaccactgcccacagatggcaagatagaacttgcagtctaagcctaaacagttgattgccataaaacaagaacatcaacattctacagaggattataataggatccagtgcctgtaaaatgtaaatccacaatgcccagataccattccaaagttatatgacatataaaaaagcagaaaaatgtgttcacatttttaccccagtggaaaagataatcaacatatgaccagatcaaggtgacccagatgttggaatcatcagacacaggctttaaaatagctattatagctgcataccatggagtaaggaatccatccttgaaatgtatgagaagatagaagtggatatcttaaaactgcaaaagaataaaatgaaaaatttagaactgaaaaatgcagtatctgaaaactggatgggctgaatagcaaaatgaaaatatagaagaaacaccccagtgaacttaagaatagatcaatagaagttatccaatctgaagaacagagaaaaaatattgaaaaagaggaacacaaccttagcgacctgtagcataatatcaataggtgtcactggaatctcagaaggaaaggagaagaagactgggatagacaaatatatctgaaggaataatggccagcatttttctcaaatttggtaaaagacacaatttacagatccaagaagctccatgaaccctgaacaggataaaatcaaagaatatgatacctgatactcatggaaataaaagctataaaaaccaatgatgaattttaaaatcctgaaagacattagagaaaaaaagcacattacattcagaggaccagtcattcagatgactgcagatttctcatcagaagccatggaaggccagaagacagtcaaacagcatcttgaaagtgctgcaagaagagaactgttaacttaaaattcttcattcagtgggtatgtcttccaggaatgaaagcaaaataaagacattctcagattaaaaaatttaacagaatatattgccaggaaatcagcattatgagaaatgctaaagtaagttcttcaagctgataggaaatgataccagagcaaaccttggatcttcaggaatgaaagaagagcaacagaaatggtaaatatttttccctgtgcttaggtactaccactgaaaacaaatttacatttctggagggattttcaatatatgtagatataatacatataacagccgtaccataaaggttagttgaggagataaaagttaaggaggtagaccgggcgtggtggcttatgcctgtaatcccagcactttgggaggctgaggcagatagatcacaaggtcaagagattgagaccatcctggccaacaaggtgaaaaccccatctctactaaaaatataaaattagctgggcgtggtggcgtgtgcctgtagtcccagatacttgggaggctgaggcaggagaatcgcttgaacctgagaggcggaggttgcagtgaagccaagattgcaccactgcactccagcctggtgaaggagtgagattctgtaaaaaaaaaaaaaagttgaggaggtaaaagtcttatggttgtaagacttctacaatttacataaaatggtagcataggaactctgtctagaatatgatatatgatatatatacctggggtgtgtgtgtgtgtgtgtgtgtatatatatatatatatatatacacacacatatacatatatatatacatacatatacatatatatatatacacacatacatatacatatatatatatacacctggccttcataatattatattgtatctatatatgttatataggctgggtgcagtggcttacacctataatcccacactttggaagtccaaggtgggcggataacctgaggtcaggagtttggccaacatggcgaaaccccatctctactaaaaatacaaaaattagccaggtatggtggcaggcgcctgtaatcccagctactcgggaggctgaggcagaagaatcacttgaacctgggaggcggaggttgcagtgagcagagtttgagccattgcactccagcctgggacagagtgagactgtctcaaaaaaaaaaaaaaaaacaccaaaacaaaacatatatatatatattatatataccacatatataaataaaaaactccaaaaaaccaaaacaaaaagatatagtgaaaaaactgaagataaattaaaatagaatactaaaaaatattcaaagaatccaaaacaagcaaaaaaataaaaataaaaaaggaatggaggtaagagaatagcaacaacaaaagcaggagacaaatagaagccaaaaataaaaatggaagggctaaattcaattatagcaataattccattaaatgttaatgatcttaatactccgttagaaggcaagggttgacagagtgcataaaaatcaagacgctactactatatgctgcccctaagaaatacactttaaatataaatatacaaaaaaggttgaaaataaacaaatgtaaaatgtatataccatacaaatagtaagaatgagaagattggattggttattttaatatcagataaaacagacttcaagacaaagagtatttctagagacaaagggggggatttcataatgattgaagggtcatttcgtcaggcagacacttcattcatacgtgtacacacacctaataagagagacttaaaatactgcagtaaagattaaccaaattacagggagaaatagaaattccataattgtgacagaagattttaatatcctttctcaatatttgatggaacaactagacaaaaaagcagtaaaggtatagttttaacattgtaaacctccttgatttaattgatatttatagaacactacatccgacaactgcagaatacctatttctttcaaatgcacataacattcaccaagacgaacaatgacggctaaaaaaaaaaaaagaaaaaaaaaggatggtaagctataaaacagatttcaaaatgtagaagaagcaaaatcataggaagtatatttctgaacacaacagaattaagttagaaatcaataacaagatatctaggaaaacctcaagtattatgaattgaatagcatacttcaaatatttcataggtcaaagaaaaaaatgacaagagaaattagaaaatattttatctgaatgataatgcaaatatacaaagtttgtgaaaagagctaaagcagtacttaaagtgaaaactatggctttaaatgcttatgttagaaaaggagaaagatttaaaatcaataacctaaggtcctaccttaagaaactaaaagaagagcaaagtaaccctaaagtagtagaaggaagtcaataataaagatagtagaaataaaatagaaaacagacaagcgaaagagaaaaatcaagaaaaccaaaagcgaagtttttgaaaagatgaaccccaaacctctagctagattggccaaggaagagagagaaacaaattaccaatatcagcaataaaaaggaattctaaccacagattctatagacaataacaagataataagaaaatgctatgttatcgaattctaccacttaaataaaatggacagatttcttgaaaaatgtagcttaccaaaattgatgcaagatgaaataaaaaatttaaatggtgctatttttttgagaatataattattttaccttttatttaatgctttgtgtattgtttgaatttttcttttgttcaactatgtgtgaatgtatttgacagttaaaatgaaaaaattttaattttttaatattatattttctttttttaaaacttgtattttaggttcaggggtacatgtggaggattgttatataggtaaattgcatgtcatgggggtttggtgtacagattgtttcatcaccgaggtgataagcatagtatctgataggtagttttttgatcctcaccttcctcctgctctctaccctcaagtaggccctggagtctattgttcctttctttgtgttcatataaactcaatgtttagcccccacttataagtgagaacatgttatatttggttttctgttcctgtgttagtttgcttgggataatggcctccagcttcatccatgttgctgccaatgacacgattgcattctttttttatgggtgcatagtattccgttgtgtttacgtaccatattttctttatccagtctaccactgatgagcacttagattgattccatgtcttgctattgtgactagttctgtagtgaacataacatgtgaatgtgtctttatggtagaacaatttatacttctttgggtatatactcaatgatgggattgctgggtcaaatggtaattctgctttaaattatttgggaaattgccaagctgctttccacaatggctgaattaatttacatttccatcagcagtgtataagcagcgtacaaccttataccagtgtataaggttgtagtgtataatctctgtaatcttgccagcatctgttattgtttttttcagtaatagccacactgactggtgtgagatggtatcttattgtggttttgatttgcatttctctaatgattcgtgatgttgaaaatttgttcataagcttgttggctgtgtgtacttttgaaaagtgtctgttcatgtcctttgcctactttttaatggcattgtttatttgcttattaatttgtttcttatagattctggatattagaccttttttggatacatagtttgcagatattttctcccattctgttgtctgtttactttgctgatagtttcttttgctgtgcagctctttagtttaattaggtcccatttgtcaattttgttgttgtaattgcttttggcatcttcgtcatgaaatgtttgccaggccctatgtccagaatggtatttcctaagttatcttccagggcttttatggttttacacttaagtctttaagccattatgagttgatatttgtatatggtgtaaggaagggttccagtttcaatcttctccatatggctagccacttatcccagcaccacttatagaatagggtgtcctttccccattgcttattttttgactactttctcaaagatcagatggttgtacatgggcagttttatttctgggctctctattctgttccattggtctatgtatctgtttttgtgccaggaccatgctgttttggttactgtagacttgttgtatagtttgaagtgaggtaatgtgatgcatccagatttgctctttttgcttaggattgccttggctatttggactcctttttgattccatatgaattttaaaatagtttttttctaattctatgaagaatggcattggtagtttgataggaaaaacattgaatttgtaaattgctttgggcaatatggccattttaacaatattgattcttcctgttcatgagcatgaaatgtttttccatttgtctgtgttatctctgatttctttcagaagtgtcttataatttgtgttgtagaggtctctcacctctgtattcctagatattttattctttttgtggctattgtaaatgggttgcattttttatttggctttcagcctgggtattgttggtgtataggaatgttactaatttttgtacattgattttgtatcctgaaactctgctgaagttgtttatcagatctaggagcttttggacaaagactatggggttttctaggtataggatcatattttctggaaacagggatagtttaatttcctttcttcctgtttggatgccttgtatttctttctcttgcctgattatcctggctaggacttccagtactatgttgaataggagtggtgagagagggtatccttgtcttgttccagttctcaaggggaatgtttctagcttttatccattcagtatgatattggttgtggggtttttcatcgacggcttttttttttttagactgagtttcactcttgttgcctaggctggagtgcaatggcacaatctcggctcactgcaacctccgccccccgagttcaagcaattctcctgcctcagcctcccaagtagctgggattacaggcgcccaccaccatacccagctaattttttctatttttagtggagacgggggttttatcatgttggccaggctggtcttgaactcctggcctcaagtgatctgcctgcctcggcctcccaaattgctgggattacaagcatgtgccaccgtgcctggctggctcttactattttgaggcatgtgccttcagtgcgtagtttgttgagggtttctttttaatgtgaagcaatgttgaattctattgaaagccctttctccatctgttgagataatcacatggtttttgtttttagttctgttgatgtgatgaatcacaattattaatttacttatgttgagccaagcttgcatcccaaggataaagcctacttgatcactgattaactttttgatgtgctgctggattctgtttgctaatattttgttgaagatttttgcatcaatgttcatcaaggatattggcctgaagttttctttttttgttgggtctctgccaggttttggtatcaggatgatgttgtcattgtagatcgagttaggggggagtccctcctcttcaatttttcagaatagtttcagtaggaatggtattatttagattttgggcattatttgaatttttttctttttcatttttttctcttttttaaaaaataattttaacttttattttagattcaggtgtacatgtgcagatttgttacctgggtatattgcatggtatatccaggtttgggatatgcttgatcccatcacacaggtactgagcctagtacccaataatcagtttttcagccctcgcccgcctctctccttcctccctctgctaatccccggtgtctgttgttgccatctttatgttcatgagtacccactgtttagcttccacttataagtgagaacatgcagtatttggttttctgttcctgcattaatttgcttagaataatggcctccagctccatccacattgctgcaaagaacacgatttcattcttttttatggctgtataggactccatggtgtatctgtaccacgttttctttatccaatccactgttgacgggtatctaggttgattccatgtctttgctattgtgaagagtgttgcgatgaacatgcaattgagtgtatctttatggtagaatgatttattttcttttggatatagatccagtaatgggatcgcggggttgaatggtaaggctgttttaagttctttgagaaatctccaagctgcttttcacaatggttgaactaatttacattcccaccaacaatatataaccattcctttttctctgcaacctcaccagtatctgttgttttttgagtttttaataataggtattctgactggtgtgagatgatatctcattgtggttttgatttatgaccctgggtagtcaaaggtttcttaggtagaacacaaaattcattaattgtaaagaaaaaaattgattacttagacttaccagaattaaaacattagttccttgaaagacaccataaagagaacagaaatgcaagccacacactgggagaaaatattcttagctcatgtattaaacagaagacttgtattcagaatatacaaagaactcttacaactccaagaaaatggttaaaaggtttaaacagatacttcacaaaaaaatggtatataaacggtgcaacaacgcacttaaagatggttcaacatcaccccttagaatagcaaaaatcaaaaagacccaatgctggcaaggcaaagctgtggagcaactggaactcccacaatttgctgatgggactttaagatggtgcaaccatttttgttgtaccatttggaaaacagcttggcagtttctgaaaatgttaaacatatgcctatagcatgacccagccattccactcctgggcatttacccaaaagaaagcatatgttcctacaaaacctgtacatgaatgttcacagcagctttatttttaacggttccaaattgaaaacaactcaaaggtccatcaacaggtgactgtataaataaatagtgatttatacaatggactactactcatcaatacaaaggaatgaactatggatgcatataacaacatggatgaatctcaaaatcattttggtgaataaaagaagccaggcacaaaaggatacatactgtttgattctattcatataaaattctggaaaacacaattttattctagatcctttattctttgaatagttgaattttaattccttttatattttccatgtaaagtttaagccctttaaaacatccatgtgcagaagttgagagagggaagaagtgtaggccaaagatgtagcattggaagtcaagaagaaaatagtctttataatctcaggagtgacatatttaaataaggaaagtgtagcaaaaagaaagtttaggactgagttctgaggaacacaaacaattcaaggtgggtaaatgaggtaaagccagtacaggaagctgaggaggaacagctaatggggttgaaggaaacccaggacaatgtatgatcagagaaaccaacagagaaacatgcttcaaaaaggaatgaagggttaactatgcccaactccaccaaaagctgagtaagttgagggtataattagtgcccaagaactatgggagtttgaatttgcaaacagaaaaaaaaaataagtagagctttgcaactatgcaagtagttacttgctagtatataacaaattttgcttaacttattcttgaattaacaggttttttatttcaaggagtacaaaattagaaataattaaaataaaaataaaaaataggttcaaaatacacaaaatcctagttactatagaccgtttcgatgtttcaccgggtacagaggttattaaattacattattaacttttaactctttgatagtcaccatctttactgctcttgaaattttaattataaaccattatttatcttattactataatttttactgtcataatcaaagaatttctgagattttcaaccaacccatatgatgaaggtatgaaacatctttttatcaccaagatgggaaaacaatggcaaactcttgcatcaatcaagttaaatgaattggttatagatggttcttagtgttggattttcacctgaagtatctgccatcagcctttcatgggaaatattttaatttaattttgaaattaaaacagtggtgtagtttcattttgatttgtatagaaaagggcttagatagtaatgcagtataaacaaccctgacagaaatcttgatttatcggttcttgggggattcagcaaaggctttagggcatgaaaggcataaagaaaacttggcaggaaccagagcagaggaaggcaagatactagccagctagcatggtgttttttccctgttctctgacagaaggaggacagccatgtgaggaagataatcatggcagcaaaagttgctaaagaaagttgcttaagctaaaatcatcaaggaatttgaggcaatgacagttcatcatctagagagatggactctaactggatgaatatacaaagctctgctttctgagaagcaggatacgtctgctgagagacagctgggagtgaactaagcttcattctgcaatctttttgctgacatttgccataatattttcagtgatgtgtaagaaatgcaattctgtaattacatggtctcctggctgtggtctccatccaaagcatgatagtgtctggacccccaccctaagagtttaacacctcctgagtgtacaggctcattttggccctaatggagagaaaaccagcagtgcagaaattcctcaggtgcagcacggtccatgataggagcccactgagtaataaatgccagaggaagttagggtgaaagagacaaccctgccagtaatggtttttaaaggctccatggaaactcttaacctttcaccaccttaaggcaaagagggactgctctgtcctccttcatatgcagactctactttcctttgtggtttccttttctctgtgcagttgccttcagtcgagtttgatagagtggaagggtggggaaatagaggaaatggaagagaagaaagagagtgattttcttcatcctgtcctggatctggatcccttttaataggatctctcctggacagttctgagcacttcgaagtgcatccaattcaggtcacagtaggtgggcaaaggacttcagaccctggagacacaaaggtaacagctcctctttacactgccaccgtctgctttttagtaggaaacctgggagccccgggcagctaccttaatgtagataagagctggcggggtgaggaaaagcgctgggctgtgagtcaggagatttgagcccctgcttactaattgaatgattctgggccagttacttaagtttctctgtgtcagcttctcatttttaaaatgggaaaaacagtactcaccctatctctttaaagggccatcctaaggatctgaagatgatgtacatgcaagtccctattggaccataaaagtttattaaaagttaagtataaaggctcttaagaagttacattaattaagaatattttaatttaaagatctgaaatatattaggggactttcttcttgaaatcccatggtgattctcgtgtaatatgaagaaggaaagttgatgggtgtcttctctaacgagaactctgattagtggaaggttaagggggtgatatcaaataggtaaacagagaaagattgtttcaattgcaggaactagaatgtgtgtagtgaaggaaaaaccacagactgaactttggaaggagtcccatgcaggtttgtaatcttcatgtagggcagagcttcccaatgggtgggtgtgaatagattacaggcatgaaatattggtctggattagttgccttgatggagaacacagtcgtaggtggccaccccgaatctctgccttcacacattgataggtctgttcctgcgttattgttatcgatatgcccatggagtgacatctatgttatcttcaggagcaccgcactaataatgacttgtgtgcactctgcccattagaatttcattattattttgaaattcttaacgtgaaaaaatttggttttgcaacacatttatattatcagctaatattttaatttaaaagaagagcttagattctttaaacagctttaataattatgaatttctgaatgattataagatgtttaaacaattttaatcacttgcttgtgcaaagttttgcttggtgttactgagaattttaaagacagcatgattttaagaagcctagtgaagaagcacatgtagccattttatgcataaaaccttataggaaaaagttagattcaaaggcgtaagctgaaatttttaaataaaaatttgaaaagatcttatttggaagtttaaaataattcaatacttaatagcttccctaatactttcagttttcaatcataaatatataagaaagtcatagtgatttctctcagctttcttccaatttactccattgtgtcacacaagtattatcattgcctctgactgccatgacatgacaccattggagagcagtaaactaaagaaaggcccatcacttggttattggctatctaattgttattgagtttcctgtgagctggtagtaccttgcttcatcagcttaacccactgccaaaagttctttatgcttcttctttgtattatgagcacattttcctctaaagctcttaagtacttgtaaatcaaggctggcattagggtgtttggatacagagattatggatagtaaatgtgaatttcttaattcattgcaattccaacactacccctgagaaaacagcccaagccacatggtacttagaggtaaaagttctctcttgatcaaagacaggtttcttttatgagctggtttcttagagccttctcttgattttgcaggaaaatgggggtggctgcccccatccagtactcagggctctcctgaaagtgctggctgtgggctggtagatatccactttccagagcctactgggatgtggagttcttgcagcaaggaaaccctcctgctgtccctggggctagggaaggtgtctggtgggaattctaggtatctttctgccagtagtaaattacttcatgtttgacttcaagttcttaggttcaattttttaggtattaaaattggtgagggtaaatgtagtaacttactgttttcttccaacaataaacactcaactctggatgacacagttggggctttttataatgactttggcaatttatggcagcatggtatagtgaaaagaacatagcttctggaatcagacaggcctaagttcaaatttgaactctgtcacttactaggtggccttaacctctctgagtctcagtttctttacctgtgtaatgcaaacaataccctaactcctgggattgggacaagatttaaaatgggagaacatatggcaagcacccagtttaatgcttggcacgtagtattcagtcaatgacaggtattattgttattgctctattattagcccgtaattacattcaaaaggacatgtattcagataaacattactagcagcttgagcaggtgatagggcatttgtaatttaacttgtgtgcttatttcagactcaaaaattactttatctcagaagtaaatcagaactcctttcccttctcaccctggactaggggtagataaaggggtggggctgcttcactaaccttctgtgggttaaagactaaatgaagactttctaaaaaccagaatgctaacagtggttccctctggtaagtgggacttcaggtgctttttcctttcttggtattattctgaagtctaaaaagtcaagctattttcattttgtaaacataaaccagaccaaagatgcggaatggtaaatttttttatttctttgaaaacttcgttcagcagctgcacacatcccacccccccaccccatccaaccccacactccccaaccatgtatcctactaagtcggtcaactcggtccctggctcctaccaggggcatcatggtgctggaaaggttttctcgttttcctccaggcaggagggaacatgatctacaggcaatcaatgaaaagcagcagcaaagtaacgcgggtaatgttcaaaaataagacaaaacaaaaaacctaactgcaagcttcagaatctgggaaaccagctagaagaagagagggagggaagtgggggaagcaggacggataaaaatacagttacaacaagaaggaaatggaaaataaataaaggaaattccttcacccaaactaagtcccttgagggagatttgttagaatggatggtggttggggggcaggggagaggggataaaattcatgtaggactgtacaatttgtgggggattcttctaaaatcatttcaaaaaggacagccaagcagaattcatacaggactcatttggatttattactctcttttgcagtctacactttctgaagtgtggatttatgagttttagatcatttgtttcccgtcccactaaggtaaatagctcagtgcgtttggtgcatttatgattgttgtgcagaggagtgcagctgatgaattacttcctttcatttatcttttgaccagaaaatgtatggttttctagcaatttaacttttaatctgtaacatttttcttctcagttttgttgcaggtgcagtatagctgtttctaatctagggaggttgggtggcccagaggttagatctatgctatcaaatatggtagcccctggctggtaagcacttgaaatgtggctagtctgaatagagatgtgctacaagagcttagtggattttggagccttggtatgaaaaaaagaaagtaaactatctcattaataatttttatattgatttacatgctaaaattataatattttggtcaaagtgggataaatataatatgttattaaaattaatttcatctgtttcttcttcttactttataaatgtggctacaagaatacttaaaattacatatgtggctcgcatttgtggctggcattatatttctattggacagtgttgaattaagagcaagagcttgggaagttcaagtcatttcctgccttatgaacttggataaattatgaaaactctctaagcttcaattttcaactagttaaacaggaataataatatctacctaacagggttgtaatgattcatatgttgtgattaatatataattatatttataataatataagtaacataaacatgtcattatttatggtattacttgaaataattcctgtgatatctggcagataatatgcactgggcaaatgctgattctcttccttgtgcattttacttaccactagtaaatgtggccactttgtttataatgaattgtttgggatcaggataaagtagcctgtacttgtgtatttctcttcatctaaaagattagagtccttgacaaatagacagtcacacaaggtctcagaagggaagaccaccattttcagctagatggagaatgagtttgtggctgaacattatacctgtggcatctcccatatatcattagctgctgtgattgttagacacacttggaggcattgattaaagttgttaatcttttgaagtgtctgaggttgtcttttaaagcccccacataagtttctgatcatctccaagagttaacaagtggagtacgcctggagatattatgaagtagacaattaaaaaaacagggccagtctcatcacaacttctctttctccttctactccctattaattttcagccattagagagtaaaattatgtggtttggagttggtttgccttttcaagccccaagggattataacccttagttatagattaccttcaggtgtcaggttttcttcagggatggcactcttttatgaatagaacccctaccaatagaaccaagcacctgtgaaatccaccctctgtactgctcacccagccttctctacttgcaagttgtcccaaaatgttacaactaggaaatgtgagtttttggtggcaacaaaggtggggttttttttgcccacaaaagtgaattcaagggatttattttggttttaaaattaatattcactttttaaaggtacaaatttgaaaacctagttattcctttagtttttaaactcagcttacagctcttattattttatttatgtcaacacatttaacaatcactcttaagatgggcttcgaataatgttttaatttacaaattgtacttctccctatttaacttctctttacagttaaatattttgattttctttaacaaaacttttctgaagatttaaattatgcttataagtttataaaataaatttatacatatgctgattcttaatttctcttaaatattctaatactatacataattgtagtaagattgatgtttaaaatcacaagtctatatgaattattcaatgaacaatttaaagctggaattacaagtctcatctattgctctcttagggcaaaactgcttaaatcctttatgcttacattccttctaattctattgggtaaacgactttggaagttgcaacaagatagatgaataaatgagatacgtccagaattcaaaggggttatcattttaatatccattcaaattgcatgaccctaagactggaagcatatgaaaagaatacagcaatcttttaagagtctttaacatagaaaatatatatgttatgagacaatctcatggacattaaaagtataataaaggaatgctgtgaacaactccatgtgacaaaatttgatatcgtagagaaaatgaaccaattctttgaaacataaataatcaaaactcacaaaaggggaaatagataagctaaatagtcttatatgtattaaagaaattgaatcaataatgaataacctccaccaaaagacagcatcaggaccagtgaattctaccaaactgtgaaggaagaaaccagccttaccctaataccaaaaccagacaatgtacaagaaaggaaaactataggctaatatctcttatgaacatagatgcaaaaatcctcaacaaaatattagcaaattgcatccatcaatgtataaaaagtaatatattactatcatttgggattcattccaggtatgcaaggctggttcgacatatgaaaatcattcaatgtaatcaattacattaacaggctaaccaaagaagaaaaatcatacaattgtatcatttgatgtagaaaagtcatttgacagaatctaacaccccttcatgataaaaattcatcaaaccaggaataaaggggaacttcctcagcttgataaagaccgtctacaaaaatctcaaaactaacatactaaaatggtaagagactggatgctttccccataagattgggaacaagaaaggatgtcctctttcaccactccaatttaaaattgtactggggctgggcgaggtggctcatgcctgtaatcctagcactttgggaggccaaggtagatggatcacttgaggtcaggagttcaagaccagcctggctaacatggtgaaaacccatccctaccaaaaaatacaaaaattagctgggcgtggtggtgtgtgcctgtagttccagctactcaggaggctgaggtgggagaattgcttgaacccaggagttggaggttacagtgagctgagattgtgtcactgcactctggcctggatgacacagtgagaccctgtctcgataaataaataaataaataaataaataaaattatactggaagtcctatttagtgcaataacatgagataaaaaaataaaagtatacaaattagaaaggaagaaataaaattgtctttattcatagatgacatgattgtctatatagaaaatctcaaagaatcaacacaaaaactcctggatctaaaaagcaattatagcaagattgcaagatatgaggttaataaacataaatcagttgcttttctgtatatcagtaataagcaattggactttgaagttaaaaaaaaaaccctttataataacatccaaaaatgacatacttagttatatatctgaaaaaactaggtataagatttatatgtggaaagccataaaacactgatgaaagaaatcaaagaaggtccagataaatggagagatattctgtgttcatgactggattgctaaaatgtcaattcttcccaatttgatctatggattcaatgcaatcccaattaaattccatcaagctattttgtgaatatcaacaaatggactctgacatttatatggagacacaaaagaattaaaatagcaaacatactgctgaaaaagaacaaagttagagaactatccaattgccaggcctactgtgcagctacggtaatcaacacattgttttcaagaaatgacagatatggaacagaatagagaacccagaaatagatccatacaaatatggtcaactaatctttgacaaaggaataaaggcaattcgatggagaaataatagtctttgtcatttcaataaatagtgctggaacaatggaagtccacatgtagaaaaaaaaaatgacacagatcttacatttttggatagttggttttgagctgtgatttttaggttgaaattttaattagcttatatttggtataaaatcaaaattcaccatatttacaaatttaatttatcagatatataagaattactttaagtacagaggaaaatttgttggataaatacaattgcaatacttaaaaagtatactgaatatgttaaatttataaatttagttgtaacacttgaacattaagaatcaatattatccaaagagctcttaaaagtgattgttaaaatctgctacagttaccaataaaataatacttgtaagctgaacttaaaagtttaaggaataatcaagtttctgtattcttttttaaatgtgtgacaggcgttcagaggatcatttagaatccttggttcataacacattctcatcattggtccattcttggtatttatttggttggtaactttaataaaattaactcacttactattaatttttatatccaaagtaaactctgaatagtcttttctttattccaaaactgtctgtgagcccataaaaatctcacatattcataggatgaaggtgggatgtggaaagggtctaaaatgtgttttcgtgaataaaaatgattgtttagaaatagtagcatttagcctagttattaaagacaggacatttgagtaatttaaaaaaatagatgaaatggaaaaacactcacccaataaggtttctattgtaaaaaggccaaagggaacgacattcagaataaaaagtcttatacttggaagtgaacagataactaaatttaatgagatggtctgggacacataggaaccctcaaaatgttactagaaggttatggtgagcctagaatattgaggggtgagtttgggccatctaggtgaaaatgtcagctagacagtcatagatataatactagcactctcggggaaattggaattgagaacacaatgtgggaaccaccagcttagaggcaagagctgaagctctgaagatagtgaaggcctccctgggggagatgggaagagaggaatgaaggcagaagaaaagttgtttttctttcaaatcctctatattttatattattccctgcttccttttcctcctgcttcctgggttgggatggggatatctcctcttggcttataaaattatctagagaccaggagccaccttgtagagtaggggtccccaacctctgggccatggaccagtaccagtccatggtctgttagcaacagggccgcacagcaggaggtgaatagcaggcgagtgagtgaagcttcatttgtatttacaaccacgccccatcactcccattaccctctgagctcagcctcctgtcagatcagtggtggctttagattctcacaggagtgtgaaccctatggtgaatggtgcatgcaagggatctagattgcgtgctctttatgagaatctagtgcataatgatctgtcactgtctcctatcacccccaggtgggactgtttagttgcaggaaaacaagctcagggctcccattgattctacatgataaagagttgtatacttcattatatattacaatctaataataatataaataaattgcacagtaagtgtaatgcgcttgtatcatcctgaaccatccccctccactctgtgtctgtggaaaagttgtcctccatgaaaccagtccctggtatcaaaaatgttggggatcactgttgtagaggacacagagaggttattttgagaaccccaaagctgttacaaacacacccaatagacagcacacctatataactataggtattcaagggcagttactacaagacaagttttcaggaccaacttttcatctttgagcggatgcacagtccggactggttttcttccgtaagagagaaagagggagagcaaaagtgagaacttttggggcagggaggaaaagtcaaagggggatggtcaggttcaagcatgaggcccttggagactgctggccaggggtgctgcagagtcaccgtttctattgtgtaaactttcctatgctgacagattgcctggtgtgataacttcactcttgtgtgcaaatactcttccttaaagacacatagagaaaagctggccaagacccaagaaatggctgtagaaagatattcattctcagggcatttctgaaaacacattttctctacattttcagctttcaaattgtataaattttctcttgacttctgactcaaaaatcttctcaaaccaggcatgtcagtttcttaattaaaaatggtgtcttagtctgtgaggcctaccataacaacataccacagactgtgtggcttaaaccacaaaatgtattttctcacaattctggaggctcgaagtctaagattaaggtgtctgcagatttggtttcatctgaggcttctgtccttggcttgcagatggctgccttcttgttgtgtcttcacagggcctttttctctgtgcctgagtatccctggtatcttttctttttgtaaggacaccagtcccaatgtattagggcccattgttttgatctctttaaccttatttacctctttaaaggtcccatctccaaatatagtcacattggggatttgagcttcagtatatgaatttgtgtgtgtctgtgaggggggaaataattcagtccataataaatagtaagctgagatttgtctactatggactccctgtcacacagtaagtacttagcaaatatttgtagaatgagtcaggctgtgactgggtaactcatttatcaatgtgctgccatattttttaaagtctcataaaccttagtcaattaaataaatttttcattttgcaagagttggtaatgatggcctagtaactttataaatgggctaaaatcaatatacttatctttaacatgagccctagagggtcagatcaagccatagtgcaagaccctagtataattcctttcctttactgaagtgttacgctggaacaacattgcagtgaaggtttaaaactaaatattgaagatgaggtggttttgcaaactttctggatgatgtgtgttaagaggcacagaaggcaagcatcttgctcccttcttacaaagaaacagaagtggtgaagtaacttgcctaaggtctcatgcaggtgagtaccagaactgggattagaattcagtcttgtgtcactccagggtgctgttttttttctttttttgatgtgcttcttgtttagcccatttagctagtgaatgtgaagattcaaggagaaaaggcttttccttctgacattgaagtacctaaactctttagaaaatctactcaggtgcatttcataaattgattacagatgaagtccaatagtaacattgtttatatttgtgaaatctaccatacttgtcagtttctagtttacagattatataaggaaatcacttacatccaaaatacaatctttgccagtacaccagcacaacctcttgggaatcttgaactacacatatactgaattgatactgcaaatcaagtcatttgcccaaatggaaggatttagggataaattcagccaacagttacatgctcagattcaagaatctgaaataaccactatattgtatagctaaaaataaagcagtttgcacaacacttggcattttcagttgacctagtcaatactagctaataatttttataattcttgagtgaagtgagttttttctttattttacatgtacaactggaatcctgaaaagttaatagattatcttttacctaagtgctacagtaggtaaggtagtattgatagtcttttactgaatctacaaatatttttttcttgaacatgacataatttcttttaacagttttattgagacataaccaacaaacaataaactgcacatacatatagtgtacaatttgatgttttaacatatgtatattcttattaaaactaccaccacaatcaagctaataaacccactactcctaaaagttttcttgggtccttttgaaattcctctttcctaggtaaccattgatctttttttctgtaactacacattaacttgcattttctaggattttatataaagtgaaacatacagcatgtaatctttaaaaaaatctcttttctttcagtcagaatacttactttgagactcatcaatgctgttgaatatatcaataattcactcctttttattgtggagtaatattctattgtatgattatatcacaatttctttatccattcacttaattatgggcatttgggctgtttccagttttttgctgttacaaaaaaaaaaacgcagctatgaatatttctgtacaagcctgtatatgaacatatttattttcctcttaggtaaaaacctatgagtggaatggctggaacatatggcaggcgcatgtgtaacatttttgaaattgtcaaactgttttctaaagtgattgtgccattttacattcacaccaacagtgtatgagagttccagttgcttcacttccttaacatcgctgggtgtggtcagttttctaaattttagccatcctaatagatttgacttcatgctttattgtggttttcatttgcatttccccaaagactaattatgttgaacatctttacatgtgcttatttccaattgtctacctttggtgaggtgtctatttgaatgttttatttttttaattgtttttatgttttcttcttaatgagttttaaaatttgttctttgtgagatatgtagtttataaatattttctcctagtttttgcttgtcttcttattctcttgtcaaaattaaaagcttctgctcttcaaaagtctattgagtttcaaattatcaatttttttcttttatgggttgttcatttggtgttatatctaagaaatctttacctatcctgggatcagagagattctctaacagaagttttataattttaggttttacatttaggtctatatttcattttgaattagtttttatatacaatttaaagtatggatcaatgtttatatttttgcatgtggatatacaatttttccagcacaatttatagaaaagcttattattacttccctgacttacctttgtacttctagcaaaaatcaattgtttgtatatgtgtggacctatttatggaccctctattttgctccactgatctatttgtctatccttatgccagtgccacactgtattgataactgtagttctataataagacttgaaatcaaggcatgtaagccctccagtgttgttcttttttcaaagtttcttcagtattcgaggtcttttgcatttccatatgaattttagaattaaattctcaatttttatggaaaaatttacttttgactattgaaaaattgaattttgattgagattgtgtcaaatctttatagatcagtttggagaaaatagacatcttagcaaaattgagtcttctgaggttgctcataacctaccttattggacacaacaagaaagaatggcactgccaatgctgtgcagcccccactctgcccttagtatgtcacatgtggcatctgatgttcaggctgagcaaaatgtcagtgtcaagtcatataataaattagtcacaaatgagcttaattccttgccttctaaaaataaaaataaagagaagattaagttatagtattttcttcctataccccagtgtataattttttcccgactaagtagaccactagtaaaatgcctttctacctctaagatgctagaatagaaaaaaaatattgttccctgctcatcccaatgatcaaaattaccttgtattttgtgatgactgctttggatttccaaggcagtagccaccatgtctcacctcatgccctgcatgacttaagggaaagaagagatcatagacaacatctggctgtctagtaagtagagcttgacagtgtcagaaacaagatgcgatgcagctattactttgttagctatagtgctctgattgttatttgttgatgaaagctgtgggaagaaatggcaatgcatataaacaggagaaatttagttataatttatgcttctttagaaaatgccagcagcaaacatcatttccaaagcattcaaaccacctatgactaatcacaggatgaccaatgttccccttgtgacgtggtaatcaagtgcgttgaagacattccacctaattttgagcattttaagcagtatgatgccatgattcagattttcctattgcaggtgtccacaatatttccaaatttatgatattttggagcctatgcatttttccctatgggcattgatgacccacactgagtagaatgagcaatgtgggtgttggattgctgggcaattcttatgctccctggagggatccctttctcaattgccacggcagctattccaaacctttacattcattaacatccaataaatattgatggaagccttctccataacagaaactgtactcccaccttctacctatgttttcttcatttttagcagataaatcaaatttttaacttttcaactacactttctctttctacttccaaatgtgcccattgtctcacatctttttacttctatcctttctatctctcaagaagacgcatccttctcaaatacatcctcaccccctattctcattctggctgatctcctgtgtctctaggaactttgttcagatattctgcttcctcttattttccatcttttcaactggacccatctttccagattgcaaatctgatagtatctccccgccagcctccccactcccacacactaaaccctgcagtggtcactagtactcttaggatatattgagaaaaaattattccatttggcctccaaagccctacatagtctggcttctgcctgcctccccattcttacttttttttttttagacagagtctcactttgttgcccgggccagagagagtgcagtggcactatctcggctcattgtgacctccacctccgtggttcaagagattctcgtgcctcagcctcctgagtagctgggattacaggcgtgcaccaccacgcccagctaatttttgtatttttagtagagacagggttttgccatgttggccagctggtctcaaactcctgctctcaagtgatctgcctgcttcagcctcccaaagtgctgggagtacaggcatgagccgccatgcgcagcctccattcttattttcactcattcctcctctctctgctctacacatactggattttcaatccctgaaacacatcttggggtttctcctatcacagggccttgcacaagctcttccctctttacttaagttccactcatctttgctgtcttacttaagcataatttctgtaggaaaaccttccctgacaagttgttattctgccagttttttccctgtagactcccatggcttgatttatgtcttattcttagaatttgccataattgacatattctatttagtgagaatgattatttgattaacatctgtctccctcacgaaggtataagcttcaggagggcagaggcttgtcttgttgtgcccaccacttaataacagaggctgggccaggtgcagtggctcacacctgtaatcccagcactttgggagggtgaggcaggaggattgcttgaggtcaggagttaaaagaccagcctggccaacatgatgaaatcccatctctactaaaaatacaaaaattagctgggcgtggtggtgcctgcctgtaatcccagctactcaggaggctgaggcacattttcttccttcacttttttctcttactactcttctctcttccttctttgttttgtttactatcttttttctctctttttatcactttatctaataaatacttattgggcaaatgaatgaaatgctagtcttcctgagggttttctggtttttgacttttttttctctttttcgtctgcctccttttccttagtaatcttatccaacaccatggcttcaccaccatccatatccataatgccccatgatgtccagacctgtattttcaactgattatcttcctggaattgtcctctagttacttaaactcaacctaactcaaaccaaagtggttatcttccttaaatatttttcttctgcttaatcctaccctttgtaaagtttgccactacccatttcaaacggcttaaacccaaaacctaaggtcatttttcttccttttccacaaataccaaattctgttgatgcaaatgaaatgtccctttccaaaatccccacttatatgcccctaagtactattgcctagttttgttcttctctaacttttccagaaggagaactcttttatgtaagaggaatatgtaaaaattatgacatgaggtggacggaagggagctgctctagctgaaggtgggagaagggatctgaaagcaatcccttgcccactgaggcagtaccagaagttggtatagtttgaaagctactagcctacgttactgcaacaccctttaaaaaaactgcttttacattttttttcacatgtaaaacacagaaataatagagatttatgaaatatctactatgggctaggcattgtagcaggtgctgtgaatataatggtgattgaaatcaatatagcccctgctctcaaggaggttatatctaacagggatggcagagagaaaaaaagcaattataaccaagtgaagtaagtgctatgatgtgggtggcaaggagctgcgggctatgtaggagaagacctaatgtagtgcagggacaggttgggggtggaccacgggtagcttcctacaggaagagactgttaggctaggacctaaaagatgagttggagttcagcaggtgaagagaagagaagactgtttcaggcagaggaaacagcactgttggttgttccaagggagctagctcagcactgtagggagaggagcgggagtgtagagtgagtattcacgtcagggctcatctttagcttaaaaagaaccagggaactctggagagtctagttcagagtataatgctttctccatccctttcttgccccgtcctgcctggtttcttctttcggctttggtactcattgggattagttcctcactgccaagcttgaagccaataatttgatctgaagcagacgactttcagcaaaccaccggaagcctccctgctccccatctccatgcgacaacctcaaataattcagagctgtgtaaaccttgaaaccacctaagccccacccagagacctcataactcttaaaaaattcttcctcaaacagaggaatttcgtaggcttgtttgatctttttatgttgctgttttcaggatataacttttctcttttcctctcaagcccgggctctaggcagttatccaagagaagagaggtctggagacttcagcctgtctcagggcacacatcaaggcagagatgaaaatataggtgaatagtctgggatatctttatgaacacttctcagatgacttggctgaaatctttctcttacatcagaactcaatggttttaacaacacagtttgataaaaaacattttctttagcagtcatgttacagtaattaacatgtaaccttgggaactctatacgtgatttaattcctctctgaaccaatttttcctagttttgtagacatatcttgggtttctttccaggtacaagaagagttttaagaatgatggccatatggattttctgtttagcagaattctctatattttgagtatctttacccaaaggttagtattagacagacagtgaaatgaaaattaaaatggaaataatagtacaataggcctgcatgttcttatctgaaacttttgtggccagatatatttaataattcaaaatatctgagatattagaaagataatatggtgcctatattacataatattataggtggggtctggagtgtgatcacgcataacatgtctgatacggaatatctgaatatccacactgcatagcatagcctcacgttagttcaccaaatgaactttggtgccacacttaacaaaaataccttagtttccgaagcattttggattttggaattgctgagaagtaattgtatacctgtccttgtcttgcttcactgagagagttgctgtatcaagggtgtttaatcagaaaaatgttatttcatcataaaatgttattttatagcctagcctaacagcattggagaatctttgtcccccttttttttttcggcacatgtctgtttgcaaaatcttttttggttataattaaagtaattcctctattggaagttcaatatactattctatgatctgagtcattattttactttcagtccaccagctgctgtttgccaagctgattggctttccaatatatatttcatttactataggttgcaggggtatctctttccagatgatctattggacatagtcctttatgcctctattacttgttttgagaaacttttcctaagttagttgtttagttgactgtgttggtccggtgggcatctcagatttatttgtctagaaactatgctacctggaggcatagaaagagtaaagtacttggaatacccagaactcctggatttgcatttcatttctgcttctttctagctatggtggtgatggcttacaatccattgaacttgtctgagctttaatttctcaacttcaaaatggggattaataataacagcttttgctacttctcaggcataatgtgaagtaaaatgagaagaggttggtgcaaacaagaagatacagtgcaattcacattcaacgaaagggaacggtctaaatgcaaggtctatatgcacttaaggtgtttttattgataaatattgggttacatggctttacttctgctcagatctggatagggaccatttattgagtggctgctgtatcaggaaccacaggaggcaacctcgattaatcccagtaaaacccctttgaggtggctgccatcattctctatttgagagaggatagagacctgaccaaggtcacatcaccacttagcgcctgagccagattgaaaaccagatttgtttgatggtaaagtcagcactccattttaattgcaaagactattgtgcaatggtgaatgttttgtggtgtttttttgtgtgttttgaaaattgagaacaagatgggattcataacaaattagatagttcacttttcttatatgtaaattccagacagtagcaataaatcacacactttggatgctcaggggaaattagttataatttaatgctttggaaaatcattatttatccccctttgtggtagaatttattctcaacatccttataaataaacaaaatgttttactagctaaaaaaattaccaatccattctttcttcacaaggcatggagacagtagaacaacggcatttttctttactatcctcttggcctaattgttcgcttgtcctgaatcagttactgaactgagaaacccaggtaagcttcccatagcattctcctttcttatttctagtatttggttcagtccgcgatactcttttagccatcggtgactgctcttactgagactgtggctgtcctcgcccagagttgaggtaggggtaggttggggatgggagactcactactaagcactgtggagtctatttgagtccctggcagtatctgtccgatatggtctggctctgtatccccatccaaatctcatctcaaattttaatacccgtgtgtcaagggagggacctgtaatccccacgtgtcaagggagggaggtgattgggtcatggggacagttaaccccatggtgttctcgtgatagtgagtgagttctcacgagatctgatggttttgtaaggcagttttccctgctcttgtttactctctctcagcagcatcatgtaagatgtgcctgctcccccttccgccatgattgtaagtttcccgaggcctcctcagccatgtggaactgtgagtcaattaaatctcttttccttatgaattacccagtcttgggtatgtctttatagcagtgtgaaaataaatgaatacactgtctatctgtctgtctctctctctgttatttaagatcagaacaggacttactgtatgacagaaacacagctgaaggggtgttagaaagtccggagcttatgaagacgttccctgacctctccttttgttaactggggcttcattccagagaataagagcttctttatgggttcagacacttctggctgcaattagccgattgttaatttatgtctgagtgttggaggctttagttagataaaatatttaaaggatttagtctcagtgaaaagaactttaagtaagaatggctttgaggaaaagagaaaagttagattccagctttccttctgggtgctgactatggtgagtggggaagtaggttatgagataataagagctttattgtcaatttttgcattcttttagaggcccccacgactttagatttccttaatatctttctccctttatagttaatttaaaaaaatattgagcactttatatgtgtccacgcattctattgccctggagcaaactctagtgatcagcacgtccataatccttgctcttatggaactcacagtctagtggggaactacacaaaaacactgcaaagttgtaaccaatgtttatggtttatggtgttatgagcgttgaggttgttagggaagactgtttttgtgtgatgcattcatcagtgttggggttgctatagcccatttttttgtggctatcagctttaggtacttttattaggtcttaaaaagaatattctagtaattaatcatatagattgtagatgggttgctggattgcattgatttttaaacagatatatatacacacacacatacatggaagcacacatacatataagtatatatatctgtgtatatgttacatgtgtatatatatatgtatatacatatatatgggtgtgtgattacataagcaatgtaaagtgattgtagagaatttggaatatcataaaactacaaaaaaattaaacttacccggaaataattaatgtctatctacatacctatctctagtctttttttctagacatacatagatttaaaaatataatttggatcatattgcaaagatgagtttgcattttcattgaatcacgaccatttctcttgtcataaaataatctttaaaggaaatttttttacttcattatactctatatttctatcagaatttatgtaattattcctttattgaacactagtaatgtgtcccatttgctactataaataatgctgtgaagtgcaagtttctatagtttatgacaattttcttttttcttcttttttttcttttgaaacattttatttttttcgactctttttttattttattttattattattatactttaagttttagggtacacgtgcacaatgtgcaggttagttacatatgtatacatgtgccatgctggtgtgctgcacccattaactcgtcatttagcattaggtatatctcctaaagctatccctccccgctcccccgaccccacaacagtccccagagtgtgatattccccttcctgtgtccatgtgttctcattgttcaattcccacctatgagtgagaatatgcggtgtttggttttttgttcttgtgatagtttactgagaatgatgatttccaatttcattcatgtccctacaaaggacatgaactcatcattttttatggctgcatagtattccatggtgtatatgtgccacattttcttaatccagtctatcattgttggacatttgggttggttccaagtctttgctattgtgaatagtgccgcaataaacatacgtgtgcatgtgtctttatagcagcatgatttatagtcctttgggtatatgcccagtaatgggatggctgggtcaaatggtatttctagttctagatccctgaggaatcgccacactgacttccacaaaggttgaactagtttacagtcccaccaacagtgtaaaagtgttcctatttctccacatcctctccagcacctgttgtttcctgactttttaatgattgccattctaactggtgtgagatggtatctcactgtggttttgatttgcatttctctgatggccagtgatggtgagcattttttcatgtgtcttttggctgcataaatgtcttcttttgagaagtgtctgttcacgtcctttgcccactttttgatggggtttttgtttttttcttgtaaatttgtttgagttcattgtagattctggatattagccctttgtcagatgagtaggttgtgaaaattttctcccattttgtaggttgcctgttcactctgatggtagtttcttttgctgtgcagaagctctttagtttaattagatcccatttgtcgattgtttatgacaattttcttaggctagattttgagaagaaaaataacagggtcaaagggagtgaaattttaaggcttgtgatatgtattgcaaaattgctttccaaataggtaatataaatctagctcccattagcaaagtacgagagtgattattttattggttaccctgtcattgctgaatatgattattgttaattagatggttgaaaaatattatcttctttttatttctattctggtctactagtggaattaaattcttttttttttttctttgagacagtctctctctgtcaccaggctggagtgcagtggcgcaatctcggcttactgcaacctccgctgcccagattcaagcgattctcctacctcagcctcctgagtagctaattaaattcttttttatacagttattagtaattagtacttttttaatgaatctcagtttatgttctttgctcgtttctttattatggtttttagtacttgtttcataaaaactttttatttattaaggatgccaataatttgtcatatgcaaagttttccgagttatttaacagaagtttctaatttgtatgtaattagatctacttgtcttttctttttgatttctagcttttatatgctcagaaagtccctatcctattaatcagatattttgtctatgtgtttgaaagctagatgaatttttaatatggtgcccataagatacttcagcaacctggtgcagtgcctaataaatacggcacttggggacatgatgtgtggttactagaagtttgcctaatagttagatctcaatagtcattggtcactgggatgaatattcattaaaccatgttttgaaagaggaataaatattacccagtcaaacaaaagggagaagaatcttccagataagggacccatgacatgaaagggtacagagggaagaaaccaaaaccatgatgtgcaaggaatgcctgcagcaggagctcagcatacatggtagggaaggtgttagttaggcatggccagatcatgcaattttcaggccatgatgagaaacttaattttacataataaaaaatgagaaatcattacaggggtttaagtaagaaagtgatgtgggccatattgacattgggaaatttaggtacattacttcagtttactaaaaatagtggagaagagaattggagtagatgagatttgagtcctggcaatccattagggaaaaaagcaagttacacttagcagcatttaacaagtgtgggctgggcatgatggcttacatctgtaatcccagcactttgggaggccaaggcaggaagattgcttgacaccaggagtttgagaccagcctgggcaccatagtgagaccccttctctacaaaaaatacaaaaaattagttgggtgcctatagttccagctacttggtaggttgaggcaagaggatcacttgaacctaagaggtcgagactgctgtgagctatggtcatgccactttattccagcctgggtgagaaagtgagaccctgtctcaaaaaaaaaaaaaaatgtggaaggtagtatcatttgagctagagaggaatacattcaggagatatttagatggtagaatttttccacttccccttgatcctcaaaggagggccaggctcatgcctgtaatcccagccctttgggaggccgaggtgggtggatcacctgaggtcaggagattgagaccagcctagccaacatggtgaaaccccatctctaccaaaaatacaaaaattagctgggtgtagtggggggcacctgtaatcccagctactcaggaggctgaggcagcagaatctcttgaacccgggaggtggaggttgcaatgagccaaaatcatgccattgcacaccagcctgggcgacagagtaagactctgtctcaacaaaacaaaacaaaacaaaacaaaacaaaacaaaacaaaacaaaacaaaaaacaaaggacacagcatagcatagagaaaaaaagatctggattggaaatctgaagcctggctccaccaccagcaccatgatctttactagttacctcccctctgagggcctctacttccttatttgtataaggactttctgaactagatgatctttcaagtgtctggcagttttaacacttctgtgttcttgtagttttagacaccagcttagtgtttcgaaactgtaaaatagcctgagaaatcttgtgaaaataggaacttgcacttttctaggatttttgtttcctgtttttataaaatttgagctagtgaggactagatatcaggatgagcccctgcctgcctcttggccagctttgtagaggggtttctgatgcccagaggagaggcagtttgagtaagggcagccgacagcaagcatggagctcgcacacagctctctcgccttccaggcgtggctcagtggcaccatccttgtggcctcctgtcttgtgaccatgagcagacacgctcgaatatgatggccatgtagccaactaactacagctgttggaagctcaaacccgtggttcaaatccattggcaattttggtaaaatctagggtttggctcattcagtctaacaatgctcacccgactgtgtggccagtaatttaccaaaaacagtatagcttgttgccattttcatctttagtggaggcagaaaaatggaaggatatagaaagagaaatgtctcgcctttcagaagctccttgctctttggtatttagtttgctattttctgtcatttttgtcttgagtcattagagttgggtttctattctgctgtctgccttgcaatgttatctaaggaatctataagcagcttaaccctgtcaacggaagattgtactaaaacagcctgttcaggaagccctggaattccacgcttcaagccattagctgtgtcttgcttacatgaagcttatcacgccaccctcagaaaatttccatcttatcatgggcggcattgtaaataatggaaaaaactgtctgaaactgtttgaatgttttcttagattatttggaaatttccagctttgtgcactagacagaagacctttgacctctgggatgacagcataaaggcgaggtatgccttctcttacttagccagggagggcccataatgactgtgcagacactttctattatttttgtcatgaagtctctgaatttagtcaccgagcctatgggaaacaaattcgctttaggaaaaaaagcttagcaagaagaattcattcctcaagtgtaacacctttttttttttgagatggagtttcgctcttattgtccaggctggagggctggagtgcaaatggaatgacctttgctcactgcatccttgcctcccaggttcaagcaattctccttcctcagcctgtggagtagctgggattacaggcacccaccaccacgcccagctaattttttggtatttttagcagagatggggttttaccatgttggctaggctggtctcaaactcctgacctcaagtgatccgcctgccttggcctcccaaagtgctgggattacaggtgtgagccaccgcgcccagcaagtgtaacacttttaaaggtcttttatttatctgcctataatcttaagagtgagtttttaattaaattttgtcactgaaaatttattattcctttaggaagcaattttgtggggggtgcttaggttaatatgtaattatatacttaaaattcttctaggttcatttaaagataaagtaatatatcagttattacaagatgccaaaggctaaaacatgcaattttctcagtccagctcactttttgtttccaaagccctttgcgtgcattaacaatctttacacattatgaagtcactgtcgccatttagcccacctttgcatcatgggctaaaatggatgcaaagggttggttaactcaaagccatgtactttattccacctaaattttgttcattctgttattcaacctgaaatatcctttcccctcaatttctgcccgtgaaaattgtatttgtctcttaagattcagatcaaatattacctttccttacctcctagggtagatttctaaagaaaaggatctgtgaacatttaggaaagcaagcagtggtcaccaggaatttgtgtggattgctgataaagaagtcattctgcactaacttcatctcttctttggcattatggctcatctgataaataaatgcaatagacatatctttggatttcagtaagtctttgatagagtctctcttgataggcttttggtctatcaatagtacaattagggggattagtaactggttaaatggctaaagccacaaatgactgaataatggcttttggcctgtgaaatatttcccgtgaaatgctggcatgcatttgtccttggccttgtcttagagaaaaaaattattaatgatgaatcagtcagaatagatgtagataatgttgtagtattgaagaccccccaccccatccccactgccaatttagtggtttaaaacaataaatattgatttctctcacactacttgttcatcttgagatgatgggggctggatgggtggggtctttgctttgggttattattgcagtcattatttggaacatcgttggctgccaaggccatgtgaaaagagatggtgaggaagcccatatggatgcacaaccatacacacctcaagtgaatgggtgtgcaaggcggcagtgtgcctgcaaggagagaaatgccatgtttgtgaaaagccctaatgaccaccacacccattgggatggaaacaaggtgttggtggatgacacaaaattaggtgtatagtgaataggattttccctcagaggacctgataggaggttctgaactttttcagtaattatttagatgactctgggcagatcacttaactttcttcagtcttggtttccttacctatagaataagaccatcagtgatattaatgtgtctgggtgatggtgaggtgctgtctggctggtactggtgtctctgagcttggagtcaggtttctctattggtgctttattcttagatgtataaaagttgttaattgtaaaatttttattatgactggtaccattatcaatttttaaaaattggctttttaaagttgaatgtaatttgttttgaattgtatattacatttgtctgatatatttttgccaaacttaaaaaacaatgtgtcaaatctcttatagatagctcattgttttttattcagtctgaaagcctttttcttttttagtacagccatttgattcatttatatttattcccagcactttaaattaatttttctttcaggcatcttaacttacactttcgtgtctatatttcccttttattctgatttgtgctgtatatactacttgctttgcatttgcctctctgtaaacatcctgattttcaatctacaaatatataccttaaataaagaaaaccctaactcataaagctcatcttttttgaaatataaaaatcaagaataaaaataagcatttatgactccaaattttgaacgctgagctatgtgggactttaaaagtttaatgtgtgattataaatgccacatttaattttttaaagtggtcaatatgtatctctttataaaatatttttctttttttctgttaagatttgcagtgattattcagacctattaagctggtgcaaaagtaattgcgtttttttgctattacttttaatggcaaaaaccatgattacttttgcaccaacttaatatatctgtaatttaacaggttttaatgcttcctgataatcctttttagttacaacttctctcttcttgagttcttttttgttttattttgttcttgttttttgggacaaggtctcactctgtcatccaggccggagcacagtggcgtgatcacagcttgctgcagccttgacatccttggttcaagtgatcctcccacctcaccctccccaggaaccatgcctggccaagtttttatgttttttgtaaagactgggtttcatcgttttccccaggctggtctcgaacttctgggcccaagtgatccaccagcctcggcctcccaaagtgctgagattacagtcataagccaatgcacttggcctcttcttgggttcttaattgcatttcatttctgtgtactagggactgtgtactgcaggaactttattcagaaagatattaggagattttctgagcctctgcatctgaggatgcctttctgctgtctttctacaagaagatcaatgactctatatgaattcttgggtcatactttttttcacttaaattccggaaatgctgctccattgctttagtgtctagtgccttgtatgaagttggcatgctttgccaagcttatttaaaattagagttgccgaggataagtctaaagttgacttttgatcctttgtaggaaaagcagccacctcccattctctaggcctaaccagtctctggggcccctggcatttgtcctgccccaggtgctgctgtgacgaccagctttgtgtggcctccagtggacttcatatggacatagccgaccatgccttgccttgtcagtcccacatccctcaccttcggacctgggcttccctgttgatacagaggcactggatatcttgagacttgctcaccatgacgtatgtgcacccagaaatgcatggaagtttacatcaccaggggcacatttttggccaacacgaggtggggaggtagtgggtaaaatgttttcccttccttctcaggacagaattgccatggctcaaaaggccccgtgaaattttgagaaatctgttatgcttgatactaaggataccttggatatttgctcttccttgctctcttcctttctcccaacttctgtttccctggggttgttttacacccaccaaaacaatagcacctaaacctttgcctcaggctttgtctttacagaaacccaggctaaaacaacaggtaacaaaaacaggtggtttttgcttgaatacttctagaattttttctttgtttttggaatttagaaaatttactaaaacaaactagatataaacttcaaaactgctgcctggatcattgtgagaactctctacatccagacttggattaaaaaaaaaaaatcaggatagttttttctagtattttatctattcgtactgttttattgtttatttttagaaatgcttattttggttaaatccttactcaaatatatatagacatttgaatagttctgcttttaccatggcttctccttttgttcacagattatgtgcttttgtattttattagcaacatgaagaatgtgttacaattgttttcttctttgtgcttgcaatgtgtgtgctttagaaggcaatgagtccctcagagtcctctggcctttcttctcatctctgtgcttgggaatgtttccacatgcccaggtttattctcctttacttatccatgtgaagagaggtctgtgaagtcccaatttttaagaacagataagacacaggaattgctcagtggggcacagtctgactttggtaaggtacaaagggtgctgtctggggctcaaaaaaggactgaaaaggacgcatggagggtgctgagttggcaacctggaagagggggtggtgctggaagaagtggctgcagctgtgggacctcatttcatggaagctgctcttgagcccctgcggcccagatacctgggagaaacagggtcctgggagaaaaggcttactcttatgccttcgatcaacaaacaacagtttcctggaccacgagcaaactggaccagctgggagcaggtagagacagatgtatgggtagagggaagtcaatatacctgtagtttcctgcagaaacagaacagtcttagggcagtgcaggatggaaagacacactccagagcctgaggcaccaaagcggaacaagcataggggctggctgcctgccgtagatccggggggattatttaatgttgtattggaatcgagagtgctgtaatttctaagactttatgttattgcatggacagtttttctcattttatgatatttcctttgttcatgtaggtgattttggtggggtggtttttagaatgttctcttgtttgttagctagaagcccaagggcatttctttgtccccaaggacaatgctccaatccaaaggatttgcatttaggaatttcaggcaccagttggcaaacaggggaatctgtgagctctcctgcccgaattcaggatggacctaagacattttagaatccagccttaggtgagaccactaggtgagtttctgagaaatgatcccggcagccgaccaactcagtctctgcagccttgtaacacatttgctagattcaagcactctagtgaaacacaaatgcacattatgtagcaaacagaattgggataggttacgcagagctaaggcattaaacatcccccttccctccccgactccgcaacgattctaatagccaggcacaagcagcgtcaggatctacgagtagcagctgcagcgtttaaagaaacatcagcttctgcacgtgcgttcgtggcgggcctgtcagtgtgcttttcagccacacctgcttgcccagatggtggcctctgtgagcggcctcagctccttgaggaaggacagtcccggattgtttcacagagatttactgatgggaaaataaccacccatcacctcagggaacattctcacacattttctttatcatgcattaaaaaagttaccagtttttctttttttcccccgtaagacaccagaacttcaagtcttttgcaataagcctggaacacaaacccattcattggttccaaagtggatttgcacagtctccacgaaaactgccaggggctaggtggggccctggtgacccaggccaggccactgaaccagagctggctctgggatttgaaatgacgtccactccttgtgctctttgggctaaatctaaaagggtagctcagctgcctgtgttttttgactctgggaaactcttttccctcatggctttcccagcacagccttacctctgttcctacacagtctccttcatgcgttcttttctgggccctgaaatgttcctgtcttcagagccacgtccttggccctcaccctttccccctcagcacttttctggggtcatccagattcctgacttccatacccatgctactgcctccctttgggacatctcctgggtctcctacagccatctcaaacttctgttgtcctctgttttctgcctcagttactaatttccatgtctcccaaaagttgacctcatgccccagtctcctcctgggattatgggtctttctttgttctagccttttctcctctctccttggtttttcactgtttgcaaaacttttctgccttttcatctggaaaaatccttgcttaaaaacagtcctgctcataggctaaaacctttgtggaacttcacccaacccctgcttcccatgctggaattaattgctgcttttgttggtaaaataagcatgacctagaacctgccggatgccaaggcactagggaccctcagagtctggtgtgggggatggaccgtggttagttagcatttgaagcagtacaataaagatatggcctaagagctgtgggaatacaaaggagggagtcactaatgctccattttagaaatccccatgtaggggaaaattaaatcagagagatgggagcagcatgtgtccctaggtgacatctatggtccactccaagcagccgtgtttcaaatgcagatctgcacctggcaaggctttctttttgtttacctcacctagccaccaatcctcccttacttccaaacacatctatcatctattatttccatcgtgaggtgccacagagcaaagacagtatcatttctcctttttcctcttttgagatctcagcatgaactcatggctataatatccttaactccttcaacatgacattatgatgttagcaaaaactatgcctgaaaaataaaaacaatcttaagtggcacccactcataatgaacttctgggttctgcaccctttacagaccttctgatcagagattgtccctctgccctggggtccttgcatttctttcctgtgggctttgttgtttaccacatgctgttctgatcatgctatctttcatttaaatagaaagatagcatgatgatgaaatgaaaatgatcctagggttgctgtgagtgtaggatacaccagtacctgatgctcacagtttgacaggtcagatcaaactgttattccagagctgaggggagagaccaggcctcctctgggaactgggacagtgaggagaaacaagcatctggtcacagccccatcccatggactctgtcagggtttaggagctaacttgcagggtgaacctgtggacagtgaattttagagatagaagggagtttggcaatagtctagtctaacactattattttacagatggtgacatggaagctcagagaggtaaagaggtgtgtttatggttcatggaggatttgtggcagccagtgtggaagccagtgtgcctgaggccctctctgtttagtggtgtccattccacactacactgtcatccctggagctctgcttgttgttgcttggagctatgagctttggtcatgagtacagccctatggggtagatatatcctaacttatgggtgaggacacagaggtataaagaaaaagaagttgcctaagatcacagggaatccttctaaaactggacagtctcacctacaagatgggaatagaaataccaattgatggaattataagaaattatgggtataaaatttgtcaggatatcatgagctattaattcatatgtttttttcttcacatttcctttcagcttgtgacattcttttatttagatagctagattagagggaatcagagagaattaagccagggacaaaagaagtcacattcttccttcttagttttaaaagtctttttttatggctgcatattccatatggaatgtgcatataacagtattccatggtgtatatgtgccacattttcttaatccagtgtatcattggtggacatttgggttggttccaagtctttgctattgtgaatagtgctgcagtaaacatacgtgtgcatgtgtctttatagtagcatgatttgtaatcctttgggtatatgcccagtaatgggatcgctgggtcaaatgatgtgttctcattcataggtgagaattgaacaatgagaacacttggacacagggtgggaaacatcacacatgggggcctgtcatggggtgggggacagggggaaggatagcattaggagaaatacctaatataaatgacaagttaatgggtgcagcaaaccaacgtggcatatgtatacctatgtaacaaacctgcatgttgtgcacatgtaccctaaaattttaagtataataataataataataaagtcttggtccttgctgtggatattagcctgttttcatctctcaagagttctgaggcccttcctattttggggattcctccatcacatgagtcttggtggaaggcagggtcctatctcctacttgaaaatatatggggctggatgttccattttttcatagaacagatttccagaacagagaagtgacaaagccctctgggtaaggaagatggggtagagaattgaagaggatggtggcgggatctcagagaaggctgtgtgtcttgcccctccctctcatccagtggagttggctgtaaaagggaatgatgtcagaacatactgagaagtctgagttcaaggctagaggggatgtgtgcagtattctcctctggagccctgggagaaggctgcctcccatagcatcctcatggagccaaaagtgcttacaaacactatctcagtgatatttctttctttttttttttttttttttgagatagattctcactccttcccccagggtggagtgctgcggtataatctcagctcactgcaacctccacctcccgagttcaagcaattctcctgcctcagcctcctgagtagctgggattacaggcgtttgccaccacgcccagctaatttttgtgtttttagtagagacggggtttcaccatgttggtcaggctggtctcaaactcttgacctcgtgatctgcctgccttggcctcccaaagtgctgggattacaggcatgagccactgcgcctggccaacatttcattttcaaatgttaaattaacatatatgttctctactgaccatgagaattcttaagataactgtgtggcaggtttaatgtaatggacaaagagtgccagcctgctgttggacttcaactcttttgggcatgctgaggccaaaaagtcagacataaagacttaagtcagtcatccaaagactggcagcttgatatcatgcaggcaagttatccagatgactgaattttgtctttttctgcttgtgttttgggatatagctgtttatgtatgtttgtatgttctgttgtgtttctgtcaggcatgagtcactaaattttacatgagctaaatccttcttggagatgtgttcaggctcagagctcaactttgtggcaaattctggcttcttggtgctagcattccaggtgctgattctgtttctcatctcttcctaatgccacaccccttcctgttcttatgcctcctgccatgtggttagagagtgacgggctgaagaggttagtcccacagacgcctgggcaccagccctgcctcagcagcacctgctattttttatttcttgtttttcccaacctcagccgctggcaagtaccattctactttctgtctctgtgagtctgactactctaagtacctcatctaagtggaatcatgcagtttttgtctttttgtgactggcttatgttacttagcataatgtcctcaaggtttatccatgttgtagcacatgttagcatttccatccactttaaggccaaatgacattcctttgtatgtatacaccacagtttgtttgttcattcatccattagtgaacatttggattaaggactacaacttacacgtgagtgcaatatttggggaggcagtgtgtgtgtgagggaaaaacaccatgaactttatggtcaacaggcttgggttccagtcatggctctgctgcttattagcaaaaccttgaaaaagttacttagcctctctttaaaaaaatttttaaaaatttaaagtatatcttgaatgcaaaagagaatgtaaatgtccatgtccagtttggagagcaataatataataatacaaaaatagagcaagcagccatatactgaccacccagactaagaaagtgaacattactcggacctttgaaagtcttcagcacccctcctggttgactcttttcacttctgtcctgaactagtatcctaaatttcatgcaaattagtcttgtgtttttctctgcagttttaccatacctgtagatctctaaacaatgtattgtttgattttggggtgctttttggactttatattaatgaaatttcactgttatttttcctttaagctttaattttttgagactcacccttgttgaaatggatagctatagttgattcatttttattattataaaccctccctccctccctccctcactcccccctccctccctccctccctctctccctccctccctccctcccttccttccttccttccttcgtagaaggtaggctcctgcctcctacttgaaaatatatgagacttccttccttctttccttgttaatttttatactactgtaaactatgctgtcatgaactttcccacacatatttcctggtacatgcatgagagtatctctagggtatctccataggagtggaattacttgggcttagggtaattgcatgttcaactttattaggtattgctcagttgtttcctaaagtggttaacccaagttgttctcccaccaggagtgcatgaaaatctcccttgtgccacatctttgccaacatctgccatgactttaaaaatcttctgtcaatctagtggatgtgaaatggctttaccttccctttaaaaatatttagtctcagctcttcttattgtgcacttctgtggcgatgagtgcaatgtatgtagtgtaccaacgagaattattttagagcaagattctccttccatgaacgaagctggtggagcatcacagatagtaactctgtagagattcctattattgatgagaatcaatactaatataaacattgactaattcctaagctgacttcttgccttcccccaggagtaaaagggatttttttactggtccccagctccaaatcctggtgttaggcatcgagaagtatcaatcaggcttctactggagacatcacgaaggatgcagaaaatacaggtcatcacctaatcataaaagggaggagatgatctgccgagttccagacaaaggatagatactttcctgtatgtaaatccctgcaatattctcttcaaggtaggggtaacagctgatataggggtaacattcttaaggacggagaaccagacccagagttgagtcagtcatgtaaaaatatattttagttctgactgttccaaatactgtccttgaacacaaaatgaatatacaaggttcctgccctcaagagttttatacccagtctggtagaaaaaaacagatgtgaatacatctataattgcattttcatatgttaagggagatgcatgatagaggtatattatagatacagggaaggcttcttagagaaggagacacttgaactgagccttgaaggatccataagagcttatcaggcagcaagagggacatttcaagtagagaagacaacatgagcaaagtaacaggactgtgaaggagcattttatttctcaggagttccaggagttcagtagctggtgaaaggagaaagaggatttttggagtcacaggcaggagatagatcttgcaggacttgtatgagtccaatgcaaggagtttgagctttatgggagcctttgataaagcaggaggataacatggttagattttggttctagaaaaatcactctgatgcctatgtaaattggagggacaagactaggggcagggaggataggatgtagtaatgatagttcaagcaagagatgaggaagtcctgaattaggtgaggcaatgaagacacatttcagttcttctcaggtttttgtgactagcagacatggtgagtgagagagtggtccgtgttcaggatgcctcctgggtttttgtttctgttgtagactggacaatggcaccattcaccgggacagtgaatacatgaagatgagtaggcttgggatgagacattgacaatgacctcagggatggacatgttgaatttgtggggtctgtaggacattcaaatagaaatgtccagtagtttctagggtgaccagctcattctgatttgtctgggactttcttagttttaaaactgaaagtcttgcagcccaagaaatccttcagtcccaagaaaactggaatggtctagaactcagtagagtttagactagagagactgatttggaatttatggaagccataggcatggatgaacattcatagggtgtgtggagagagagaagagaagaaggccaaaggttgttcctgagcaaaccaacctttgatgggtaggagagaaagaggaattcatgaaggggcctcagatgggaagcctggagagacagggaagagatatgagaagataaggttgtgaaagccaaggttggggggaacaattgtaaaggagggaatggtcaactatgtctgagactgcagaaaattgatgggtggactggctttttgaagtggtcaggactttttgtaacagactgattttgtaataagaagtcaggggaggggtgacccacagcgaggaaggggatacacacttttaagaagttatagtgtggaatgacagaaagaagagctaagctagtatgggaaataaagatgagggagagtttcgaaaaaattaaagaaatgtgatctggtttataatgagggaaagaagttagtgtagaaagacagattgaaggcataagggggataactgttagaataattgggagggatggggtgaactagagcagacccctcttttgagaccaaagatatcagtggggaggggtgtggggaggggtgtagcaagggcatgtagccacttagctacagagttgggatttgaatcaatgtctgccagatttcaaaagtcatatgatttccacctcttcttagaaaaatacatatagcctcagtaaaagatgtgcacacatgcataatcacttagtgctacacacagacagatacgtgctgctggtgaaattgcggaagtgatcagaacaattggagccaggtgtagttcatctggggcgcttaacaggaaagatgaactttgaacagaattctcagggaatagaagaacgtggtgagacaagagttagattaaattttttgtaaaaaaattaagtcattctccaaatcattcttcctttcagaaacttgctttgaggatataaaaaatttgcttcttgttcttattggtgtgtagattctcaatagatgaaatcacagtagagtatattatcccatgtagtgggttgctagtccctacctcttccatatccatttttttccttttctttcatagcagcagaatttttaagtgatatcatggcccctcaactacctattacattacccacccttcccttgttcttgaccaaggcctggccaattggatgtgctcagaagtgacaatgccactcctggttgtgcctttaaagggagagatacgtcttccttgccctcttttctctactctgctgcttggaatgcagagtagtaatggtgatcagtcttgaaccatgtgatgagagcaatgtcctagggatggtagagcaacaatataactggagcttaggtctctaaaactgagggaccctaacactgagaggctaccttaaaataagccattgctaatttggatttatgttacagtagttgaatcatatatgtaataagactaacataaacaatgacatttctttgtagtattcatatgcatttccaggataatactgatgtctgaattctttgcctgtttcagtcccatattaaagacttccagagagtgtatccctgtgagcttaaattcctttgcctgaaacctaactcagagtcacatctaggtacaattatatcaactgggaaggatgaggcagggttaaccttggtcaagatcatccctgatcacctttcttggtcatgcattcttggtcatcgcatgaaacatgtattttcttaatctatttcattttttaggaagctgttgaggagttggtttgtcagttagcattgcatttagctgtgaataacaaaacttgactagatggtggcctaaacaagttagggttttaagttttttctcgtgtggaacaagaaggctgactgtggtaggcagttcagagctttataatgcactcagtgtccccctaggatacctctgtttttctacctagcaaacttagcatgtagtttttgttttcatgtttgtcatctcatggttcttctttaggcatcacatctgtgttctaggaatgaaaaggggaaaatgtaaagaaaaaagtgcaagcctactgagttgattctctcattttcataaaaattttatagtgacatatacatacagaaaagttcacaaatcacaagtatgtagcttgattaatttttacaaagtgaacataccaatgtaactggcacccaggagacacactagaacatttccagcacttcagaatccttattcccttgaaatacctcttatataccccaaagaatggcatagattaattttgcctgattttgaactttatggagtcatatagcagatactcttttgtgtctgacttcttttgtttaacataatgttcgtgagaatcacccatattatttcatagaattgtagaacatttattctcactgctatattctaatgtataaatataaattttaaaaaatccattccggtattgttgggcattcaggtagcttgcgggttttagtaattataaattatgctacaatgactattctagtacacatcttttggtgaacatatgttcacatttctgtggatatatacctatatgaagaatccctggattgtagattgtgtttatatttagctatgctcctgcaaaacaatttctcagagtattttttatcaatttatcattccactagtagtgtacaaaatttcagttgttccatatccttggcaacacttggtattatccatcccttcaattttggccattccaatgagtatgtgatagtatcatataatgtttttaatttttatttccctaataactaatgaatcacctaaagttgaggtacttttcatttcatatgtttattggttatttggatatcctctttcgtgaagtgctttctgtaattttttttgtacagttctcattgtattgactgtctttttgatattgttttataaagctctctctatcttctgaatatgagtcttgcattagcttgctaggggtgccttaacaaaacaccacagactagatggcttaaccaacagaaatttattttctcacagttccggagtctagaagtccaagatcaaggtgtcagaagggctggtttctcctgaggcctctctccttggcttgcagactagaaaatatagtatttttagatggacctattgtcactttgcacaaagctgagattttttgaaaagaggagaatggacaggcaactagcaaggtctggctcagtccctaatttttctaaaactagtagggatgaaggaagaagaaaggaagtggtaccttcttttcttatcaaatgagcagtgttccagggcttgtgctgttacagctggaaccacattggcgcagctcaggggaatcaatggttcttgttattccctggtctgctgagattgggctaagcaggaataaaggtcacagcagctcttctagtaagcctatgggatggccatgatggttcccatggaaagtgtataggccagagaagattctccccaccaccaatctcatttatggtttgatggagctgagagtcccagaaaagcattccatgacatttcagcccaatgcatcccctggtaagagaaaattttcatatcagttttggaacaaaagattgtaaaaatatttcaggaaataagccctagttcacattgtcacatataactacataaagggcattgaattatcttacttatatttttaataagatgatttttagtattgctcatcaactcttccccttcccctcaaacaggcttgagactgttcactagtatatagggtaatctgtgccttgaaagaaagaagatgtgatatctgttttctactacactgatttgaatctgttttctccaaactgcgacccaatctagcagaatgtaaggagcctatattggcatactaagaccactgccctcccatttttattgaaaaaggccaagaatgaaaaagcaagctgtcttagtctgagagacagacatcagggtgggattaaatgtgcaaggattttgttaggggaaatacctgtctgggagaaaatgggtagggagcagaaagagctgttagactatggaacaagtctatctcacaaatggagagagggaaggaaggttaggtggaagtgtcctagaccattgtgcagcctaaggaagcttcagcaaggttgttatggagtctgtgaaccaaagttggctgtcagaggagtcccttgtgtcccaggaacaggcttgcccaccacatccagtcattggctaggagcagcctgtggctgggagcagccagtatggacgtggtacaaatgtgatggtggatctcagagtgcagcagctgaagaccttggtcaattaccttccctgtagctggatatttgcaaggcacattctaatggcagcttagtttgcttttgctagaaattaaagaggccgggcacggtgcctcacgcctgtaatcccagcactttgggaggctgaggtaggcagattacctgaggtcaggagtttgagaccagcctggccaacatggtgaaaccccatctctactaaaaatacaaaaattagccgggcatggtggcacacacctgtaatcccagctactcgggaggctgaggcaggaaaatcgtttgagcttgggagacagaggttgcagtgagctgagatcatgccactgtaccccagcctggccgacagggcaagactctgtctcaaaaaaaaagaaaaaaaaaaagaaattaaagagagcattgggatgcctctcacttttgtgaaatgtaagaatcccacttggttgacaccagttgacatgaatgactttaggaagggagtgaaatatggtgagtcagaagagaagggttaaagaagggatattggatgaacccaaagtccataatattaaaactgaatgcactatgaattattttcattttaaattctattgtcttttcttgagtaggtgctatgaatagttttcttaaaagtttaaacaaaaacttttcaaataggttgattttcaggtctgaaaacatctgaatcaaacatttggtgtgtagtgacatagcaaaacaaattcaggtcaggatccctgacctatgacttgttgacagattcacagatcagtgtgctcatgttttgaaaacaagcaacctaggcatgtaaggcaagatatcagatatctgagaatcaactttttgttgctagttttatttttatattgcacaccatcaagtcctagaaagggcaaacacaagaaggcaccaaagctaagttctgaatttggcccagggacaaacatccatgtaacggccatagcagcagggcctgcaaacctgatttattcctctgtcatctctctaaatcacaatttatgctgataaggtgacctaacttgtttaaaagtgaaatggagaaggttgatgaaaatttactgcatcccaggtttgtgggttggacgcctccattagcagcaggaccacaggaaaaaggagtgggaggaatacagccagaaacaggttctcactctgaacaagattaagagatggaagagctcatgagatcatctcactgaactccccactttactgcctgaaaggcttgggagaggaggggcatgtctgaataatctattttctgatttttctctttcttcattagaagtgatttagctgatgactttcctgccatttctcttggggagatagtccttaacacacacatgaaagtcatcagtattaggaagtttcttcagatgattattatttttttcagaggattttatggcattagtcttcctccaaccaccgtgaaatcctttttcttcccagtttcctctcccatgatacctatgagttattattcgtcatgttagttttccaaccactcagctagggctcttctttcttttctgattcatgggcaggtcaatcctttgaaaggatttgccacacacatgattcatcaatggcttttggttttctgttattcatttagttcttgaggggtcctagagcctgtgaccaaatgacacacttgatggcttcctgaaggagctttctcaaaagcaatagaatttccttgcatatttgaatctgctcttgcagcagtttgaagctgtgagcccagctctgtgaagcagaaggttagacattaccacagactccaaggcttggaaacactgcaggacattttgtaaacagaagtgcagccttaggaacacatcttcagcatacgggggaagttccagcacatttcacaagagggaaaagtaatgcaaggaaaggataatttcagtcttctgtgttgattacccttctccttgccctctgtacaagggggttagcaagggcagctggtcgcaagactgcagctgttcttaattgttgattttagctttgcagtggtcccttgtgggaaaagatgccacatctgtaccatggaatgtacttacaggtgtttgagagatgttttctttcctacaagttacatgacactctgtaacagacaagctattaagacataccaggctgatgtccagagacatgggcttaaatggctcccttccttttctccattcttctcatacatagacctgtgaaaaagatctgctttctgcttaagccagggaagggtgcatttctgacattctctctttctgttccctgcaaatggcctggatacatcaacagcaaaagagaacatcaggttcaactactttacaaacctgctcaaagtaggctcaggttaaaatgggtccctagttgaaagcaatgttaaaaaaatacaaaaacgagcgtatgagaaatattagctttttcttttaaaaaatacaaaggctacttgagtaaaaataaaatctgttttttgtttgtttgttttgttttgttttctatgagtgaaatgctacaacttgggttctagattagggcagggcatgcattcatgtttgttttgttggtgtaacaatgggtttcgttaagtggttgtgggtgtctcatacgcaataggacacattgaatgcattgatatgaatggattaatactagtacagtactcgctcctcctacctccccactccctttaggtttgaggcagctaaagctgcttcttccctggactccacatctattctggctcacctgtgattatcccccatgcctaccctgacaacccactctcgactatgcttaggatcagcacctagactctcctggccctgtgcctactgtggtggacacatacctgtgtctcatgagggtgggatgggaaagaagacagaccttgcatatactggctgaagtgttcacatgcatgtaatcagtgttcctcgacctcggtaagaaaccacagggctgcccagtcctggtccctgcgtgtgttcttgcctgcatcttacaaatattaggaacaggcccacactagcatgctatctcttttggtgtgttactttcaaaaaaggaaacaacatgaattttcattaaaaatacaggtaaatttctcactcattctaaatcctgaaggcaggtgcacagaaaattagtctcaatggaaacagaaagtgaaattgaccacttttatttctcccttttaagtaaattacctccctcagcagagaatgtatttattccagaattaatctgagcatttgaaagttattgacgttttagaaaagtatatccaaaggattgatagtggcaagctgaacagtattttaaaaacccacaaaatgtgccaaggtctgaaggccattcaagttcagggttgtgataataagcataaccgtaactctgaattctgtgagttcaatcaaatgcttggactatacaatcaagtaaaaagcttgacagatttttttatagtgcacagcttagtaagagctcagtaaatatttactatatttaaaaaaatccacccagtgtctggatgggtttggtcacagtagttcatcatgtagcccaagatagggtagcccaagtcagcctaaatctcgtggtgcttcagtggcactgaaagccaaccatagcttccaaacctgacgtagatactttaatgtgataaagtggagctaattttcccatttcatgtgtaagtagatgcaagagtgcactcacctcaatgtggtttgattcctatcccgcaaaagcacacttcagtctcagtattcatgatggtttcagttcacttattggtcattgtccctttgctctttggttctctggtctcagtgtaagaatgcacactgatttctgttagattctatctgggcagaggggcggggatggattatctttctgtgattgtgtatgagtttgggagtggatgaatagaggaggagttatgtagtgagaagatgggtacactctgatgagggtctccagtggcggcccaaagtgattcatgaagtagtagaagctgatttttgctctctccagccttctgctttctagccttaaagcatcgtgggtttttcccctctcaggactcgattccctacggtgaaaaccctaatttatatttttttctgctctgttcctatgtggaattaactctcagtgtttttcaaattgtgaatcttgacccattagtagttgttaaattaatgggtcaagccagtagtaaaaaatgaagtcatatgaaatatattaggaagtgtcagagcacatcttaggcagtagggaaagtattgcttctgcaaaaacttttatttcaattgtacgtgtatgagagagtactgaacagtactgtaaaggttgtgatgagaacaatttgaaaagcactgacctcaagcaagttgttagaggtggatttgtaggtacacaacaggcatcaggaggaaggtttaggggcaggagacctcttctgtgtacctcccactacctcatgtcggcagccatcttcccatttggcctatattaaggtcatacctattgttgttggtcctttatccttgctttgtggaggaccatcatgaaatcaaaatattcttcagtgaatactttgcagcttggaaggtgcttttatttacattatcccacttgactacggattctacacaccagatgctaggttcatcccagaagagaggccgggtccagccccctgcccctaagaccacctctagtatgatcttatctagcttgtttttatgatgcaatgttaatgcagccactgcccataaggggacacatgaatctgaaggtattttccatgcatgattaacttttaaagttatgttgtattccttggcctaagcaaggtgtgactgaccttatggcatctgtagtagccaagggttgacattagagaggatgaaataagcaagtggtaatggctctcaggaattatggtaacaaggagaagaggatggttcttcactgctaagcagcttgactaggtgagagacagccagcatcttactgcttcctggcacatggagtgttccactgagaatcacaggcagactcaggcaaccagccacttttcaaatgggctgtcttctgtagtgctgttccaccaccattctgtgggcccaactgttgccattctgggggatctgccattgctagcttaattccattcacttcaattcaattgctgttatgaaaggcctactagtgctattcccctgagaatctatagagacagggtagaactcttggatgaaaaggtgagggcttaggacatctggttagtggaacttacttatttttgggcctctttcatcaagtaacaccagctgatgcctaggagtgtgggagtcatatcggctttgttgtcgtctgttagaaactcttcgtgttcacaaaaaaaaaaaaaaagcagccttggagaaatcttcaacccagaaggagttaagctgtgtgtctgcacagcgcagctttgttctggcaaggtcccatcagtttaggtcatttctgatgacttcactctcctggtgacatcagcctctaatctcctgaaggtgaattcatgtgcgattgcttcaaaatactcactccctgagttccgagccattcccgttgatatatggacagagcttgtctttcccaggccacagtctggtttgtgcactgcatttgtgcttaccgtatcatattaccatgtggacattatgtcactaactggcacaaccggctcaaaatgaaatatgcttgctgcaagcaaaaacccaaaagctaacatcaactctccccaccccctaccccaggtacaaaataaaagggctagagggatggctggactagattttggtttaatatgtttctaactgttctctccctcctctgcctttctgtggcctgaatgttgatagtaactttatcatccttttcagtcctttatacccactaactcttgaaaatgtttggtcactgatggcacaaattaaatgtaagactttggaataatttagtttagcctcttcctaaaatatcaagtctgtgaactcaagtaacctttttaccttctaagaccactttcttttctttgtctttcaaatgtcataaaagaatacagagtagaaatgaaagcagcctgggcttattgggtaggtgccaggaattagctttgacaaagatggtgttctgtgcacttggcccaagctgacaggcatgcagatgcctctagaaattgtgggagatgaactggaagtatccccagagtttgtccagtcttagggtggtgtaagtacattttaggcccttctcctgttatccacaggctgtgttgacaccctcttgtgtcaccagggattcagaatgccacagtgcctccctgaccactatcatcctcctgctgcccccactctggggcagaagagggtagtctgtctacagagaagcagagtccccacaccacttccaggatcccaagcacccatttattttgattaatagctcttggcagtagacagtagcttctggaatacagaactggccgggtacacactgaggtttaaaatcacatcaagaaaatagcatactaacacaggattgttaaggggagaaactggtgttcaaacaataaaatactactctcactgtttatctttgtttcattttgaaggaaataaagaaatgaaaccttacaagtgtagcagcccagttatcaaatagtcatagccacagacactcagttttggggtcagcccacagactatgggggtactttctctgcctctgcacaaaataaatgttgaggctctcaattttttgaggacggaaataaaatccctggatgcttgcaaatatattttttaatgcagggatagctaggttttctgagtttcagttctgtttcagctggggtgcgggtgggggatggcctgcatcacaggggaaactggtggaatcttagtccaggaggctggcgccattaccattcacatcagctcatgatatacaaaggtaccagacttttttttaaaggcccagtataaagtaatccaactttctttctcctgctgtatatccaaggaggtggaagtattaaagaacccttttataccttctcaatgccattctctttcttggttcatgcaggaaaaaaaaagaaaaaaaaaacacagaagacagactagagaaaaaaaaaacccaaaaatctaattaaaatacaaaattaataaaacattctcatgtgctcaaatcctacatcttctcttctaacagcatggctgttatatatgcacctgcttactctctttccccagtaaagaaacagcatctccttactccagaggaattggaatttcccacttcccgacttcttgctccctgcaagctacttgaggaccacaaaggctgagccttcttgtttgactgggaagactggaagagctctacctttctagcagagaaatgcctcctgtggacagtgggccatagccacacatgggatagaagacgtgaggggtgtctgacttttggaaagagctgagcactggatgagacttatatttttcccatgtgccttactggggttgtacctggagagggagtgcttcttttcatttctggaggtagagtgcgatttgcttttgcagttggagaggcaaggaaaagctgccagtgtctgtagcaagctaggtaatttgcgtataacatcactcctttgatgacggcatcaatcgctttgcttgactgattctgcgaactagtgggttctttgatgagtgtgccttgccctcagtttgctgagcactcttcctcggggtgggatctctaagccataaacaaggagtatttcccctccagtttaagatcacaggttgacttcatcgtatccactgtctcaccagctttctccattcgccagcccagcccaagggcagcacagccttgaaggcaccaaatagggaaagcatgccactccgtacctccttcctgacatcttctgcttagattaggctcatgccagggtcagagccagctgcgccatcacacccgatgcagccttgggacgtgctggaggtgtaggggagaggaaggctgcccccaaatgctgatctgcatgtgtgcatccaccaaagcatgtgatgggaacactcttatcagcagatctttcatcccagccctgccaccactgccgtgtgaccctgagctaggagcctactccacacaaggtgtttctcgtttgtcctgagactctagctctgaagggaaagagttcctgttggggccatcgacccccatagccactgggataaacactgatgtagttgttgctcaactaatgagtgaaggaaccaatacggccaaaaaattttttgaaacgtgtgccctccctagaaggtcagctggggcccctgttttgcatgcacaggcctgccctgccctgccaccctaccaagtttctttgagtttgtaatttggtctgagactagagatgtcatctgatatgatattcccacccagggaaagtcaccttgggaggaactcttgttatccctggtgctcagcaaaagcctgctggctccttgagtgctgggacactcatgtctcaacaaggcaccgtcactcttgtgtccccgtgcctagagcagggcctggcaggcaggcactcaggaacaacttgatgaattgagttgttgaagtcagctaaatctttctgtacaggtgcaaaacttgctgttcaaaataaatcctaaacatgaaaacagaaagctatagacaaaatcctaagttccagtgatctcagggaggcaaaacctgtcattctttgaaagaacctatttggatatgtatatgttaatatatgtgtatgtataagtacacctacatctcttccatctgacatgttttaatagtgtgcttatggagtgggtttccgaaaagagctaagtctaaaggagagaacctacagttttctcccaaatgggggcatctcactatagcatcatggagtttgctgtttaacctctctgttaagcaattcaaggagttaccttctatggaggtggcttctcagattatttttttcctataatatcctcctccagctgcttcttgacaaagaagcacttgtttattcactccacacaattttttttgcaagtcttttcatttttgttaataagtttcattttctatttagctttctgactctgtgcttgtgccttcaacactttcacaacgattttctcttcgtcgataaggaaagcatgcttgatcctgtcatgaacacatttagcatacatggaaccaccataggccctgctgacatatttctttgttttggacaatctcataggaattttaggtcttacagcatgaacccctcaaagtctgcctgggcacataccacatgtagattttggtgctttcccaaccttcttggtataaaggtaaatgattctattaccaggggttccagacagcttagttttgttagaggttgtattgtaggaaagcctatgttggtgtgtcaaacgcaggaccattctgagtgcctgcagacaatgtccccggaagaggaagaagaaaaccttgcgaaccttgcgaggtcctccacataatttttaatattaagattgcttgcttatttgtttattctctctctctagtccccctccctggaccctcaccaccctgcccagcactaggcactaggagcactccatgagggcagtgattatgccttattccccattgaaacctcagcaccttgtccaatgcctggaacacagaaagatgcttaatgttggtgtgcttaatgaatgaattgctaggaacaaatgacttgtgaaaacacaggggtgcctctcctggcttggtttattaccctggatgctgacaaccatcagcacatgtgaaaaaacaatttaaaatcaattctctggtgaatcaagttttggcagtgggtgattggtgtttggccaatagcctctcctcgaaggcattattcacacataaggcatagaagcctggccgagaggtcttcttctttttttttttttaacttagtattgtaaaaaaaattttattgtggtaaaatacacataagatttacaatcttaaccctttttaagtgtacagttcagtggcattaagtatattcacagtgttgtacaaccatcagtctccagaactcatcttcccaaacagaaactctgtacccatgaaacactaactcccctcctccctcccccaaacccctagcaatggccattcgactttctgtctctatgaatttgactgctctaagtacctcttataagtggaatcacatgctatttgtctttttgtgactgtattatttcacttagcttaatgtccttaagattcctctatgttgcagcatgaatcagaactcccttccttcttaaggccagatactattccattatcggcataccatactttgcttatttattcatacatccatggacacttgggttcttccactttttggtcattgtgaataatgctgctatgaaaatgtgtgtacaaatatctgctttcaattcttttgagtatatacctagaagtggaattactggatcatatagtagttctatctttaattctttgaggaacctacatacttttttccatagcgactatacagtttcacattgctaccaatagtgcaaagagttctgatttcttcacgtcctcatccacactttattttctgggtattttttttttttttggaaatagccctcataatgggtgtgagatagtatctcattatgattttgatttgtattttcctaatgattagtgatgttgaatatccttgccatttgtatatctttagataaacgtctatataagtcctttgcccatttttaaattggtttcattgtgttttaggaatttatatattaggttggtgcaaaagtaattgtggtttttaccattacttttattggcaaaaactgcaattacttttgtaccaatttaatactttgagtatttattccttatcagattctgtgttgcaactatacatcaacttagaaaaaatgacatcttaaaaatattgaatcctccaattcatgagcaagtatgtttgttcatttattaagaccatcttaaattttttagcaatgttttattatttttggtgtatagcttctttatatttttgtcagatttattcctagaattctgtattctttgatgtcattgtaaattgtattgattttgaatttcatgtttggatttttcattgcttatatacaaaatacaattaattttgtatactagtattgcaatgctgtaatcttgctatattagttagcacacttactagttctagtagcttctttgtacattccggcagattttccacacagatgatcttgtcattttcttgcttttacttctctatttccaatctttatgcctttagtttggacttcattacatattgtgctggtgggaatcttcagtataatgctgaacaaaagtggtgagaacagatatccttgttttgttcctgatcttaggggaaaggaattcagtctctcacgattaagtgggatgttggctgtagattttttgtacatgtccttcgtttatttgaggaacttttcttctgtttctagtttgctaagggtttttatcagaatgaaggttgcatgttgtcaaatgctttttatacatgtattgaaatgatatatagtttttcttttttagtttgttaatatggtgaattacagtgattgattttggaatgttaaatcggctttgcattcctgggacaaacctcacttggtcatgatgtattatcccttttatatattgttgaatctgattttctaaaattgcattgagaatttttacatctgttttatgaagaatattaggttgtagttttcttttcttgaaatatttttgtttagttttgttatcagtgcaatgctggccttgcagaatgaattgggaaatctcctctcttctttaattttctggaagagtctacgtacaaatggcattatttcttccttaaatgtttagttgaatttacttgccattaatcccttccagtgcagtttttgtctctaggagtctgatttaggtctttaaaaataactcctccatttctgttaaactttttgaatatatggaatacaattttaatatctttttaaattcctttgcctgttaattttaacatctgtgtcagttttgggttgtttttgactaatttttctcctcaatgttttctcatttctttgcatgcccaataacttttgtttgaatggcagacattgtgatggttatttttttttattcctatacatgtttgggctttgttctgagatgcagttaagttacttagaaactgatccatttatggcttacctttcatatttggaaagcaagactagaacatcgtttagcttagggctaataaccttctactactgaggcaacatctttctgaatattctactcaattatatgtaaaattataaggttcttcaatctagttactggcaacagtcactttttctgacctcatgtgagctccagttgctgttctttgtaattcttttagatggttcttcccctggtctctgctagcttcctcagctgtgtgcactgattagtactctgttgaatattcagggggaccatctacagatgtctgattctctttccctgcaactctttgtcccctctctgtcctgccaactttagccatgttggtctttccaaacccttgcttcatttcttcattgtagggaatcgttgagctgcactggagtttctcattcctatgatatggcctggaaactttcatgtcagtaagttagggctttggtagggttcttctcattcgttttctatcttatgtcttctgttgggttctgtcatgatgattattcactattgtgttcactttcttgtttcattgaacatatttttaatattttatccagtttttctagtttgcttttgtagatggtttggtagtaattacctagtctgcaattattggaataagaggcctcagaccttttaatttcaacaaagtttttttccagagaagtgagcagctatttcaggtctgctggagtcctaaggtagagtccaattgggattgagagctgaccatctggccagtctgcaagttcttgcagaagaacctactgctgaggactgaggagtgtgggagtgagagggtgcttgttctgaggggagaaggagccggaaatgacagccttgctagagaactgaatcatggttatcagagaggaggagaaagagtgagaatgctgccacatactcatagttctttcctgttcagatcccattcgatttgtgaagtgtgacattgagagtctgttaaaattgaaatgcacttttataaaaattctgtaaaatatggagccataggctctctatcaacaggtgggagtgagaggcagtgaaatctgagttatgactgttaaggtgactgtttaagtatacccaggctgtgaggcctgggggaaatcaggttacacagaagccaagttaacccggatccagctccaccttgcagagtttcgttaacagaaggggtccttggtacaaacccgctgccggtcagaaactggcctgaggccagaaactcattttaccttaacctcagaatgtccatcagatgatgaggttcttgcctaggacggatatttttctaagttggtactcagagattgacttaagagtccttaaaatttcacaatgagtcacacataaggccaggtttgctgaaaccgaaagtgttgaaactgcctgggggcaatttgtcggtaacctgtaggcatttgagaagctatgaaaaggattaatataatgcataaaatgaaagacaagcagtgggggtggggagtgagaaaactatttccagtgaacatagccctagttcagaagacgaaatctatatttcactcagcagagggtacaaatctgtattacattaactcagcaattctaaccaaaacaaagacaggatggcaaatatttaaacagtgattaaacagtgcccaggcaataggaaatgtctgctcttgccaactgtttgcttgaatgaaataaaataaataaggggcatacaaactgtgtcttcctggttgttctcagggaccttctctggcataggggcagctccctcaatcatgaacttgagtctcatgggtcccattagaaatagcctaatgagaaagaactctgaaaactgttaatggctaacagggtacagaatatgtatttttcttttaacgtattttacgtatataaatggcagggtacaatcagagcagatttccccaccaggaggttgaatgcttaattcaaaacaaacgcctattgaatttgatagtagatctctcccctctctccctaatttggctttttgccagctgttaatctaattgcaggggtggcagcctgagattctgtggccctctagggcaactcaaagtacatattgtcattactaattattatatagtgttgctgtgattaaaagcaccactgtcctttgaaaagcctcaaatgagatgacagcacagaagcacctgagtgtgccccataaactgatattctatttgctgtgccattaaagttcaacaatgccattatgtcttaagtgacaatgaaaagttcccattccagcttttagtcagaatgaccacaagtttgatgaaaccccactcaacctcttctccagtcatcttgaaagtgaagctgtttggtgtgttggtgtgaggtaactaaccatggtgctactatgcgcttttgtaggcagagctggcctggtgacttaattcacattgggacacttactgtcacattcatcgcactggattaaatactgcaactgaacagccaaaagaagaggtatcgctataggttgagtgatatcttcccctcaaaagatgtgtagaagtcctaatccccatttcctcagaatgtgacgttatttggcaataaggtcgttgtagatacaattagtttagatgaagtcgtactggagtagggtgggtcccaaaccaagataactggtgcctttataggaaggggaaatttgtacacagggagaacgtcttgaacataaagacagaggtggggagatgtaactccaatccaagggatgccaaagattgccagccaaccaccagaagccaggagagagacctgggacaggttctccctcacagcagagtgggctcatgtcttagcctgtttgagctgctataacaaaataccataaactagatggcttataaacaacagatatttatttttcatagttctggaggctgggaagtctgagatcaagataccagcagattcagtgtctagtgagggcccatttcctggtccactgatggtgccttctgactgtgtcctcacataggggaaggggcaaactagctctacggggtctcttttataaaggttctaatcccattcatgagggctcctccctcatggcttctcaaaagtcaccacctcctaataccatcaacttggaggttaggatttcaacatatgagttttgaggggacacaaacattcagaccagagtagcccctaacccaatatgactggtgtctttataagaaggtggctttgtgaagacagagacacatgaggagaatgccacgtgacaactaaggcagagactggcattaatgcagttacaagccaaagaatgccagaaattgccagtgaatcaccagtagctaggagagcagcaaggaaggacactcacccgcaggtttaggggggaacatgtccctgctgacacctcaattttacacctctagcctccagaattgtgagagaatatgattctgttttaagctgctcaatgtatggtgctttgttatggtagccctaggaaaggaatacagtcaggaacactcttgtccataggcaacatgggatgtagcaatgtatggccaaatctttctcctcccaccatacagaacacattcattcaaagagtataaattggcccaagcttaatagacattctcttttttactagtgggtcaacacaagtataggccaggttagttctatagataaaacagaatttgaaatgtgtaatgttaaagccaaaggtccaatggctatttattccacattctatataactaccctaactcaagcagccgctctaaaaccccagtgactaggaccctgaaaaagtgttctttaaagtgtcagaacagagattcagactctcagaatttgctgtttcagtttgagaagatgaagagtttgaagatgagaagactcaaatttgagtccagcacccagctgccagtctagcagcccattgtagcccccagagaatgaaaatggaatgcttggtccaatccccatggtgggtgtcctccaggaagctctggggttcccaactggcctccagccataccagggccatatagattccttaaaataaatatctatttgtgtgttgccttttggtggctctgatcatctatagcatcaagtctaagcatgatgcttgaataagcctccatgatttatgccccctctgggctctgggctcctgttgcatcacactgtccctttagctttatatctagttacacaaaattacttgttgtttccacaataaagccttatgtgtcttgtctttgtgaccttaactatcacttaaattgacaatgccctttccttcttttcctactgaaacaaccctagttaatcttcaaaatattcataagggacactttcctatgaaagccttctttgacaacatcctccagatagacttaataccttttttctttgtataattttttacctgctcctttactgtgcatctcaaactatatttaataatttgtttataatcatcttttaattaaactgtgagatccttgagggcaggaattgtattttatttatataggatgcccagtagtaagcatagtgcctatacctgtacaggtgattagtaactgtttaaatgaattcttcatttaacaaatatttcttgagactttttatgttgcaggcattgttctgggccttgtagatgtggcagtagtcaagaaaaacaaagacctttcctacctgaagcttgtgttccggtagagaaaatggataaacagataaaaataatagacattgcatatactttcaagtaatgatatgtgctacgaagaagaaaaaaggcagtgtaggaggttgtgggtcgatgggatttctcttagattcacaaatcaagaggtgatcaaatgaaacttaaccaaaaaagacaatgacttctctctaaccaaacttgattactgatagtctttttccaagtcagcttaatgtgctgttcaagagaatcagtgtggaaggaaggaaatgtgcaagagagtcctgtatcagacacagtgggcagggagctttacatctctcatcttattgggctttgacaacacccttcaagataggtgctgttgcagatgaatgacaacctgaacttcagggaggccaaataatgtgtccatgtggagtgtctgagtgtgtaagccaaggttcaaaccccggccatcctgggccacttgtcaacaccagttctacagttgaattctatgaatacttatcaggtgctgacttcatgtcaagccctgttcttcatgcttagcatacaccagcaaatagaatagacagaaatccctgccatttcagaaagtaacaagtgttgacaaggatgtggagaaattgaaacgcttgtgcactgttggtgggaatgtaaaatggcacaggtactatgggaaacagtatggtagatcctcagaaaattaaaaatataattaccatatgatccaatgattccatttctggaaatatacccaaaggaatggaaagcaggatcttgaagagatatttgtagactcatgttcatagcagcattaaccaaaaggtagaagcaatgcaagtacccgtcaacaggtgaatagataaataagatgtagcctatatgcatttaccacacatggaatattattaagtcttcagaaggaaggaaattatgacatatgctataacatggctgaaccttgatgacattatgttaagtgaaataacccagttacaaaaagacaaatatatggttctgcttatatgaggtacctagaccagtcaaattcatagagaaagtagaagagtggttgccaggggctggcaaaaaggggaagtggggagttagtgtttaccgggtacagagcttcagtttgagaagatgaagagttctggagacgtatagtggtgatggttgcacaacagtgtgaatgtactcaatgccactgaattgtacacttaaaaatggttaaaatagtaaatttcatattatgtgtatttcaccacaatttaaaaaatctctgcccttgtggagctcatgttttagttcagggacatgaacagtgaacagattaaatatgtaaatcataagctattagaaggagatgagtgatatagaaacagaacagattgaagaagattgggagggctgcgagcaaggagagtgtgttttcagttttaaacggggtggttagtttcatggtcttcttcagctagagttaaaataagtcgtcaataaagcttgtcagccatgaaactggggtatcttccttggcatccatgctttgcccagaacactctgacttgttggaatcttgagtggaaatttaaagtctctcagaaataactttcaagtttcagtgtaggaagtccagagcacacagaggggaggagggactgtcactgggcagcatccagagggacttcattttcagtgtgtgagggagacagccaggcggggcgtgcacattcagggaataataaacagtaagagggagagggcagaagacaggtggagtgtgttggaggtgggtacactaaggcaaggcaggaggctctaaaatttgtaggctggatgatgggaagtaagtgcagtgtttaaatttttattgtaaattagttatttactccatccattgattcctctagccagtgttggagggaccagcttggcacgtgcttctgggctccttcctggggattgggtgcaagaatggctgccctcagagaatgaatcacaatctggtaggaaagtaaaaacatatgcacattgggaatatttaaatagcaaggctgtgtagtttataccaagatgagtgatccagacaatagatgctgtagacaaggaagacagtcaaaatatctgtcaaaatttctaacagccagtactgcacaggcatcagactggattgcgatggatgccaatcccatcagaacacactgtgggagtggacaatctgtaccccatgaatattagccctggtatggcagcattgaagagcaaaggtctctagggactggggccactgcgcaacagttcagggaggagatagaactcagactgagcctggagaggtggggagggagagagaagcgggaataattaaattagtttcatgatgtaagtaggattcttagaagattattctgacagatatgtgtggcatggagtagagtgggaggaatgaaggaagaaaattggtgaggaggctgttctaggaattgaggtgtgagatgagaagaatggaggactccctattggagagaaaggcttgacccgtgagccagggagagctgagcggcgaagagtaacttggaattattccgccaagagccaaagtatttatttcttaccacgaattgttaaaatgtgactatgaagagtagtaaaagcataataaggtgtgaacttaaacccttgacactctttcctctcccttccctgaaattcctctcttaagatccaacaagggacttgaaaaataatattgtgaaaatggcttgcaagacacagctggattcctcacaggactagctttgttagcagaaattgctctaggatctgcagtatgcagagcacaggggtgggcagatcaacctcagcctctggattgggtttgggagaaagtctctttaaagcccccagcactattcctgggaagccccactttaggagttatgtcccgggaaggttcctgacctgctgtcctagcaaagcccaagcttcccttcttgtcaaagttggacttgggcaccctgctgttcagctctccacctaggcaagctttgtgtagcgttcaggaggctctaagagttgtagggcttcccttctgcagttttaatttgagtgttaataaaaaaactctttaggcaagtgataatattggtacagacctctttgaaaagaagagaggaagatacacgaccgaatgcatttcaacttccacaagagctatttgaagaggataaagatgaagggtaaagggataaagtgggtggtggagtggaaggccagttggagtagtttattctataaagagtgagataattgggtggccatttgcaaacacacacacacagacacacaaacacacacacaattacacccttcactgtgcaccaaatgcatcaaggatttatatattttaatattaactttcataatacaatcttttatactatgaaaataagtaaatataccactttcttttctttctaaacattcactcactgaaggatatctaggttgttttcattttttggctatcaccagtgaagctgctgtgaactttcatgtacagatttttgtgggagcatacgtttatctctctgggataagtgaccaggtatagtacaatcacttctgggtcaaatggtaattgcgtgcttagttttgtaataaattgccaaactgtttttcagagtggctatatcattttacatattacttatatatgtatatataaattttttaaataataaaaattttattatatagttttaaaaaacatgacatcagataattttgttttgctatcattataaagtgaaaaatgaatgtttaatatgttaagaatggaaatcatgctcacagtatattcttttaaagatagtttaaaaataaatttatgaagaaagagagagattgatttagttagtatttagttaatatgaacttctataacaaaataccatagactaggtagcttaatagcagaaacaaaattctcacagttctggaggatatgtgattaagtaaaacatgcaagacaagaatactataaatagcacaatatgattttaaataaatgttcaattcattaaaaaaataaaggtacacacacatgcaaattcttgcttaaggacaaggttatgaaccttggcaagtcacctccatggaaatattaatgtatatcatgcacaaggagtggaggagcatcactgggggtgatttttcttccccaggggacattggcaatgtctggatgcattttttgttgtcatgactggtgaggaggatgttaccagcatctagtgggtgtcagccaggaatgctgctaaacattgacaatgcataggacagcccctacaacaaagaattatctaccctcaaagtcaatagtgctgaagttgagaaatcatggtttagggagtcttgattaaaacttttcaactggggtaccctgagatggtgaaatatactagtatgctttgcttcacagtgtcaactttactcgcatctgcagcaggtgagttataatcttcacaggagccagctcctggggaaagactgatcatagaagaaattctcattggctttgaccaaatccttctccttgccaattaggaaatattgactttctaatcttttagcaaaagctccgtctgtatttgaatatatgtttggttataacaaataacttgtttccacaaatggaaaaaagtatcgtaaatggcaacagatatagtttagtgctgactttagatggtggctggacctcctataggacaggcaaagctaagtactttctactcaaagccatcaaacaaaatgcttacaaattagaatgtaatggccattgctttacttgttttgataaaccagaaaaacaggcttcagcttattgaatctattattgaaccctaattagctgtggtgtttggacattctgaggcccatggtaagataaataatatttatggtttcttccatgtatcaaataattgtgtacgaaatgtagtatagtatggaatgctctcttctctcagagtttagaccacagagtgaccaggcgctcattgtggggttagggttgaaacgctggagcccagcatgggtaatcttcgcgtagacactctcaccgcagatatcagagagcttagcaacatctcaggctcatgcagactcctcgctggtttcctcaccaatgcccttcgtgtcgccatgtgagctttgggtggaattgaggaagggcagcattaaatacactgagtaatctgaaaatgaagggtgggggaattaaaaacgagttcacttgggttcaaggaaaatttttgaggatgtcagcattttccatgttgggggaaaaaagagattttaaaaaacttttctctcagagaacttgctaaaatatcatcagtgcataagtgaaaggagatagtgtggagaaaaaaattttaagccatcaccaaaaaggcgaagtcccaaagatacaaaccaaaattccaaggtaaatacatcaatgaagacaaacagaactggtctcagtttccttatctgtaaaataggcagaaacaatcccttatcctaaactcttgaaaccagatgagtttcagaattcagaacttttagtattacagaaagataataaagtacatattgtcatttattatatagaacactcagaggcattggagggcaatatcccttaatgaaacacattaatttttctgtagtgaaatgtgcaccaaatgagttaagtaaagactataagtagcctcatgttagtttgttaggttttgctgccaagtaattttgctttagacttatgaaaaaatgttcagttttcagagattttagatttctgaattgcaaatgagggatggtgtaccagtgtctgtctcaaagaggtgtcctgagaataaaatgccataatggataaattgtgcacactgctggtgtatactaagcatgtaataacagtggctattgttactaggtttttgtttttataggtaaaagtattcagatattataattataatattattatcagcattggaattattttgggttgatgtatatttcttttccatttcttctttccttttctctccttttttccttaaccccccacccctactcctgtctgcctggctgtctccctcctttcccccttccttctttccttccttccttcctttcttttcttttctttctttcttttcttttctctctctctctctttttcctctcccctcccctcccctcccctccccttcccttcccttcctccatccctcttttctccctctcctacacagggctttgaccttaatatccttgcatataacaaatgatgtgagtggtcatctctcatctggtttggttactggacagactctttaagcttcatctgattgtgtatgaatagcagtcctcttattaaagagataaaaaccaaaactaaaacaaaaatagtaaaacaagcagcacgcatctcacttgtcttagatttctgtgcccttttttctcagcaagacccaagtattctaaccacaatgattctgatgaccaggaattctagagctggcagcctggctgagtcagagggatttgagttggatcagcacagaatccagaccaaagtcacggtgaactggcatgaaaaacaacaacaacagcagcggcagcagcagcaacaatatagacacatgcaaaacacaaagcagccagctaccagccacctccgaattgtatccaaatgaactgctactcatacctccacttcctgggccccatttctctgattcctttccgactgcagacctattagccacagtctcacattgttctagatctctactttctccctttccttgcttttggctctgccttttctttctttcttttcttttcttttcttttctttttttttttaaataaggcttcaactcttcaacttctccccttttaaattatgttatgaaccatccacaggggagaaaagccaacaaactcatgaactacattctgtttacaagttcgtttctaagtctgattatttatttctttaatttagaagttctatatccccaagaggaccttagtaactgaaagctgctcttattttactaatatatttaataactcttcatttttatagtaagaatgaatctaggcttgccatatattttcatggtaaaatattttaattcctctgaagaagacggaggatcttaaccaaatgacttatgcagagaatacaggcatagaaaaatggaacaaatatcattgttaattgttttttctgtgatgacagtttactctgtagcagcaattcttaaacttggtacctggtattagtacagcaggtgttttggaaaaagtaaaaggattctgtgcccacataactttgtgaaactttactttgaacaaaattaagcagatttcattaatgtagaaacagtgttccggacatacagtgtttgaaatattggtactggcctactggcaggtcagttgtgaggtcttgacaccctcagttttctaccaaggaaaactactcagttaacaagctactgctcataggcagccatagttggacttttcccctcatcatggctggtgatgggagtgggcactggattccaggctggccagatcatggactggccacaactgccaatcaaggacaggaccagtcaattagcagacaacacatagaggccactgggaggcagcagggtccctgaggatttccgaggaaatcagtcaggtataggtggaagccttgagagatgaaagagaaaagcagagtgggaggcagggtggctgataggctgtgtcaggagctgtggatgggagacaggaaatccaagttacagaggagaggtggatggactgcctgcaccagaggggcaaagaggtaaccttattcctagatcaactctaggaccttccagttgtcttttgctaggttgggctgtgcaccttcctgattgccccaagacattcctgtttttatttccagtgacttccacttctaaacttactcattacccaatgcattcttgtaatacattctatcataatttgaagtagcttgaggactttgtaccttgtagctaaaaaagtctaatgaatgcttctggtttattcttaaggatttttttataataactttttttctctgcaaaaatagtacatgacaaattgaaaacccaatgaagtacaaagcagacaataaaaatacctatagttaccctcactcagtcactgttaaattttggtatatatctgtgaagggctctttctctgttttcgaattgcaagaatgggtgcacaccacatacactgttttctatttttttaacctaattattgtaaatatctttttctttttatcacaacatatttaattattatgtcatattttgttgtatgtccaaagttcaatgaattctcaatggttgaacattttggctgtttatttattttttgctactgtaatcagttctgtggtaaatcaccttgaaggtaaatatttgcacacatttgtaattatctctcaggataaagtcctagaaggggaattgtcaggtcacagcatatgcacggttttaaggattagaatacttatggaaattactcttcaaaaggtctaggctaatttacatatcaatccagcagcctctcgtagacaagctttgttttctatagcttctttttgggcttttcccctgtcctgtagaaccttctggattttagtgttgattgtcccacccttttgatttcagagcattagccttctctctaagctttttaatgctttgcaatgagattactagttctataattttcagtgctggctctggctgctttgtctcagaataccactgcaattttctgttttttcttttcttttttttttttttttttgccaatggatctattgaactgcctagtgagcagtgcagggggagaaaggtgaacccagtttcatttgcatcccatgtggctttggcagcagtagcatcgaattaaactcaagccccggaagatgtgcttcctttggaaaatgaaagacctacaaagttcaaggagcccattcgtggcaagtaaattaagagcgtaaacccaaagaatgtctgcagtttacagcttggtattacacggttgcttctgattggtataatctgtcattgctgtgatgtgtttagagacaactcagattacactcctgatacactagctagggccaaccacctgtggccctagtcaacgatcaaagatagttaccacaaatgctatttgaggaaataatggcttagagtggaataaaaactgcagtgctgcttttattgtgtaacttttcatcttatgtgcttagcggaacagggcatgagaatcctatttattggcagtaagactctttcttttacccttggtgtcacaagggcatttggggaattttgctgttagttaaaagttccaaggcaccaagcgcaggcaggctgaagagatgaaacttgagccagtcatttttactgcctgtttgcttctctggtaagaacttctgggagaagcatgaggctaccagttaaaatgtgtaggttggacttttgtggattacctatttaagtattcatgttttctctaatagaataagtacatgccattgagaataaactgtatttattcatacatttatgtattcattcatttttcccttattcaaagccatcaactgaatatctattaggcaccatgcactgcatatatttaaaaaatatttgcatgcattttattcaagagtttaagtcccagccaaagcaagaattttagacttttatttattaatgtgcctggttttgttacaacctaataatctgcctcctgggagcctttaagtcttatggtcttatgggggtggtgtaggatgattgggggattgtcctttaattaaataaaaaggcatgaattgtttgacacagcggtcatgtgaaaaaggcaagttgttctctagtgcacaacaaaaagatcggagcccctatttccaagaagtgtattttgtggggatgcaggattggggacctacgctgtgcctctgcggtcacttggtttccatggtcgctctcacctctggaggccgttcttgttttggcattgccttctcctatgcagggtgttgcctcttgtcctttattaccccagagtactgctggtatgagattattgtgtgaagctgacttttcagagggctgaggctacccttactctgataccagctacaagttcagagggtttgccaaacaaccctccagtttgataatttaccagaaagagccacagaattcactgaaagccatacttatgattcattacaggaacaggatactagttaacattagccaaggaagagatgccttggacaaagcccaggaggggtcgaaatgtggagctcccattcatcctctctcgctggcatcatagagagtattacctcctcccgaccactgtttgtggcagtatgcagggcattgctgggcagggaagctcattgagcttttggtgtccagaatttttattgagtcctaatcacatactatctgcatggctgatcttcagtctccagaccttcccagaagttttggctagcatctttcatcctcagttcctctgcaagtgtgaactgatacaacatggcctaaagcctccatcacaaatcacgtaattagactctctgattgccaaagtccccaggcaaacaaagatactccccttagactggacactccaggggcctagcatcaccttcttgtacctgagggcaaaagccagagcttttgtgtgtgtgtgtaaagttaattcttcacgaaacaattatattaacaaaaattttctagaaatttatagatcattcttaatctcactgactaggtcttctctccaccttgtgaaccctgaaaacctgagacaggtctcagttaatttagaaagtttattttgctaaggttgaggacacgtacctgtgacacagcctcaggaggtcctgatgacatgtaccaaaggtggtaggagcacagcttggttttatacattttaggaagtcacgagacatcaatcactatgtttaagatgtacattggttcagttcagaaaggtgggacaattcgaggcagaggcggggcaacttgaagttgggagggggtttccaggtcataggtagataagagacaaatcgttgctttcttttgagtttctagttagcctctccaaatgagccagtcagatatgcattcatctcagtgagcagaggagtgaccttgaatagaatgggaggcaggtttgccctaagcagttcccagcttgacttttcccttcagcttagtgatttcggggtcccaagatttattttcctttcacaacctcttcattttccattatattttttgaagttccttttttatctagaccctctgaatatcatccttttacctcattcatggatgcatattctttcttttttaggctgccttagaaatgcaaaattcccctcactttgctatgcagagcaatccatctctcttggatttgccttagtataaccaggagcccaggaggcctcccattccttgtctgcaaaagcctatccatacccatgaggtattttcctcaacaaaacaaaacaaaacaggaatctattcctgactccacctctcctttagaaggccaatcctgaacaaaagtaatcatcaaccataaatttctatacccagtgaaactatcttcacaaatgaaggtaaaataaagacaatttcaagcacacaaaaaaatgagagttttattatccaaagtctctcactaaaggaagttccaaaggacatattttaggaagaagggaaatggttccagaagaaacatctgagttacaggaggaaagttgaatagacaaacaaataacaaacagaaaggtaaacatgggtaattaaaaaaaaatgcaactgcaattggtttttgtttaaaataagaacaatttattttccccttacagttacatttatgattatattgcaggtgttaaaagaaaaactttagaaaaattaaatttagtagagtttaattgagcaaagaatgattcacgaatcaggcagtgtcctgagccagaataggtttggtgtcaccttgtgctggcttgtggttgaaaaagatttatggacagaaaaaggaaagtgatatacagaagacagaatgagatacagaaacagctggcttagttacagctccacgtttgccttatttgtacacagtctgaacagttagctgcctttgattggtccaaacttggtgattggcacaagcataggtgacagtctgtgtacgcatccagttagattacagttcactatgtatggagaaacctttaggctgaacttaaaatatgtaagaaaccagctttaggctaaacctaatttaacacaggtaaatctcaatttaaatactattggtaaccttttctcattattggctgacaaatgatgtcccttttcctttagaaacattttcaaagaatccaatccttttagtcgtcaaatcaagtgtttcttagttttcaactgagtaagaaaactttttcatttattatttactagggtcaggagcatttagtagcaatgataaaagtgcagatcagagactacttatattgaacagaagtgctttataaggtctctattcaactgacattctgttaagtatttctagtcaatggattcctacgcggactgttgaaactttaagctcaggataagtggtctggatgtgcagtgcagtttagtaaatgaactagagctcgggttctatttgcaacccagttttttggagctgaaggggcccttggaactctttaatcccaggtagaaaaatggagactcaggaaagcagcacagagcatttgttgtctgagataagagagatggggccatttgagagctctgaccaggcccatggcaggcaaagggctgcagagcgtttcaaattggcaaaattgacctgtacttctccatgttgtgcttctcctcagaacttttgggaagccgtgtgactgtcatcattccagctagaacactttcttcctccagaaagttttgtgatctgttaacaatcatgtctggaccaaagaatttggggaaacttgaagccaaaacaaatttatctaagattgttgttgtttttaaacaagtggccagctttgcaaatttatggattagtccccaaagcttgtgctctataattgacccttaacaggttagcagtagaggagaagagagacaaaggccacactctagggactaagagctatgagagtgtcgagaggttgggagggctgtgtgtgtgtgtgtgtgtgtttgtgttgttggagaaggatgatcaggtgtaggagagaagggagtaactgccacacttgtgaatttggaagcaatttcaaaatctctatgtggagattttcttttgttatatggacaaacttggggaaagcctcaaaaagttgaatgtcttagatctccacattctatttttttttttttccaagagaatgcttacttagttgcgggaagcagcctctaggtgtgcaggagtgcagatgcatgtcttccttctcttctagtggctgggactcttcctgggctggcatggcagcaactgtgggtgggtggtgcagaatttgtgctggtgtgggaggccctcataagtgacccagcctctgtcatttccgagatgttcatgtggtgatgtgtcctttgctctaaaacagttgctgtcatttgtgataggtacacagaagtgtatggacacaggtgcaaattcccagacccttacctgtcaccaggaggctggtggacttttccagggtatttgcccccttttcgtctcctgaatgacaatgttgtgaattgcgtgggggttcaatggaagtgttttactgactggggatttttattcttgctcattataatattatcttctctttatttcctcataaatactttaggtttcctgttgtaacttttgcttttcaatatccattttatctggtggtgatgatgatgatgacaatcatagaaaacagttacatagccatcagaatgtaccaggcactgctctaaacactcaccttatgttaatacatgtaggcctattattatcccccttttataaatatacatgttcttagaccttttccttttattaaattagattttcattcttatgttatccagttttatacccaaagttttagttccttttaaatttatcattctgaaatttttattgctaaaaattatttctaagataagttgtattgtccaatattttcaattctttttcttatttttgtattctacttgcttaattacatttaataattattttctttaatgctgccttagggttaacatttttcatttttttaatccacttttaaaaagttctttttttcctatatataggggatatagaaaaagttacacaatagcatagggacacattctctccaaagagaggcaatggtatggggggagcaaaagatagggtgagaccatcctagagtaaaagggaacaagaattaaccacaagcaacttcggaacctgaattagatgctggtacaaaaacaaaacaaaacaaaacaaaacacagcaagcaaagatattcttaggacaattgtggagatttgaatatgaactggaataatggttcactttcttaggtgtggtaatggtatcagggttatgtaggagaatatccttatccttaggccattcatgagagagatggagaaagtaaatgaggtaaaatattaacgattattgaattgaaagatatataggcattgatttcactattcaacttttttgttggtttgaacattttcatggtaaaagttagaaaatacaaaaaaaaacacaaaaacaaaacaatttttatctttattatctgtttttcaatttttggtcttaacttgagtattatttatattattatctgtttttctgtatttttgtcataactttttagttcctattttatatttttattgtttactgctttataaaatttatgcgtttactattttataaaaccaggtaatgcctctggtcctggatgctggctggggaaaggaacagcctgtatatattggccaagatgatgagattgaagttgcagagcttgtgttctctctggtcacctgcctagcccccttatcagatacctcacaccttcactgttggttcccaaaaaaactcatattaacattaaactcatagtcctctcataaattacgtgataatctaaaatggagagatttgcccttttccatcttgccattgaaattctcatgaaaacaacaacaataacagaaataccaagtgcaatggcaggagatctgcaggagaaatttctaatggcccaggacaggtgtggctctgaggcaggaagacaacaggagatcccctctctccacccctgctgcagagaggggaatggggcttagtggttacccctaggcctagatatggtttgtcaaaaagaacacaaagccacaagcagaacatagtgcaatttcctaaagtgtgagtagacttgagggaagttacttttatattaaaataaacatgggtatattttggaatagcctgcaaaagggagatgccaaaggaattttatgcttattgaaggctgttttgagacatcctctaagactcccaggagtataaatggaagagtttgtgaatctctgtattatgattaattatgggttggtttggctaaagaaggttttgtagggggaatgtttttgtgggccaatattgattatatatttatatatatatatagagagagagagagtatagacaactttttcttctttgaatagtaacctactgaccatttgtacgttgaagtcctatcccccaatacctcaaaatgtgactatatttagagatagggcctttaaaaaggtaatgaagggaaaagggggtcatatgggtgggccctaatccaatatgactgaagtccttacaggaagaggagattaggacacagatatgcatgcataaaggaaagaccatgtgaagacatgcagagaagtcaatcatctgtaagtcaaggacacaggctcagaggaaaccaaccctgccagtcaacaccttgatcttggacttccagcctccagaattgcaagaaaatacatttctgttgtttaagtcacccagttgtgatactttgttaagggcagccccaacaaactgatatactgctagaatggtgcttatcaattttgttattctgttaatttgtttcatttactttccaacacagttttctcctttctcactcactgatatcctgacgtttgacttcctgatcagaaatggaagtgatggggttggacagcaggtgttggaaactcaaatgccttagggaccatgcatgtggatgtgcaaatccaggatgtagaataaagacgtgtggtggttgctgtcacaatgaagggtgcattcccacttaaagacattcagattccaatgctttaaagccctgtgccagcccaaatgaataaataagtccttacctggactgtctggcaattgcaatccctgctccagtacagcctgggcctcatccccatgttcccttgatttattacaagaggtccataaacacaggtgccaaccaaaccttgtctgtagactctgtaatgccactcatatactcacctcttagtaaattaaattgcaaactcacttgttaaattcaaattaatttccgaaccttttttattggatactttcttaatcatgatgatatatggggtttatccagattttttaaaaaattcactttttgaattataaaagtcatgcatacgtatatgtttattgtgaaaagatacatttcttttcctcctgtggatcttcccctcagaattccagttctaattctactccttgtgtgaacccctgaacatgcacccatgcccattcatttttctgggcccctcacagcagctctagcacctccacctaaaaggattgaaagggaagatgagaccccattgcagaatatttgaagtggttactcatcagccctgtatatacatattaaaattctctgagttgttacagcagctgttgcaactgaaaataattcagcaaacaggatcattttctgtgtagtttatgggctcgggaacagtccagaagctttggaatttgagttactgtcagcccgctgctcagccaatctccacatgtcacaggctggtaatttgatctacagctcccttgaagtgagtttgtactgaacacagaaagctcttttttccccctttttgccaaacgctaaatagccttttatgtgtgtcttttttccccttacacaatcacgatttgattcaacaaaaatattacacaccttcttcctgaggattttgtgtccttttcttggactcgcagctacacattttgggcagcaagttcccttgttccctcggcagctgcctgcgcgcagtcctccggagagcctaggcctgggagagaccgccttggatttagctgggcctaagaaaacacaggcacagcagtgagaaaaatattatcttccaattccccttcctttcaagactcaggaaatctgcttcttttcagtgctcttatcactgctgtgaagttttgatttttccaatctccagtggtggtttaaaaggagcttagagcagaagctgaaagggcctcctgtatttagagagcagaagccccacctgctgtctctggggcacctcccagtggccagggccagggggtgtgtctgatgatggagacagttggagccacttcagcactggcgccgagtttatttcatctgctgatatttagattgtggtggggagggcagaatgcctgatgatgccgtcagttcaccaccatgcaacaggtagcctgctttccagctactttgcatgatatccagactttctggcatcaaggcttggtggctcacagggcttgaggcaacactactctgtagcttccattttttttagtgattccctcaccggtggtggatctacctaagatcacagtggccacggtggtatgctattttgggttactgaaaactgaaacctgtttttcgctgaagacagtttgcctaacagtttaataacctttatacttagaatatcaggagtcctgtctgtctgatcagccagtggtaccattaaggaaaaatgaaagattggttttcagagtcactgaagttctggtgatattttaaataaaaattgaatacttggacatctaaacttatttgattgaagccttgggatgcctaaagtcattgtggttgagattatatctgtttatggctgacaaaaattatcataagtgtatagagtcttatgttggggaccttgctgtccatctcgagaccatctgcagaaaatcccaacagctgcagtttacttctcatttttcagaatagagattgattatgaaggaggcacaaaacaaaccaataaacaaaaaacccaaatatttgattatggcattaactttatggtcatttctagaggagtgtgtgagagacattaactaggttctgattcttggaatagattagacattggccttgcacccagctccacggaatgatgtccccagaaggccttgcttgtgcctggacactgatgtctgaggagtacgcttccctgagctttccatgggtcaatcttagagggcagggctccatgatcctggccttgactgaagggggaaggatagattggaggtttttccaaagactcactggaatttggagataaaatatttaataggttgaaagcctttacaagggagaactctggtctccctgtgaacgatgaccaaatatggtaaaaatgttcccatttctggtggatcaatcagtccttaaatatttctagaataacttccatggttaaaatctggatccagattttctaatgagcaatttgcagaaagaacccacctgcatcaaatggcaaagtcagaaccacgtgcaagagtgaactgcacagcccttgcttagcaacatgccgcttgtagcccactgggggtggagtgccctccaatccagactctacactaagaaattaggtaattcaatggcaatagtaattttagctgcagtttaaggaacgtttacagctttgaaacaggaaatggaaaacaataagtaagaaactataaaataaattgagcacatagctttctgttacattttatacccagtggtatggaaagtttacttaaggaaatgacaaggcttatttagaggaccagcaacttctggagtcttttattgaaatggaaatgggagcaatgttggatactcttaaggctatttctttgtaaattcccaattgggaagctttaatatgtgtccagaaggatttaaagacatttttcttttaatatttacatgccatattataataagatgaatctttgctgtgaatttgaatctgaatattaatgttggctgtattttattgagtgattatagtgagccaggctctgtattaagcacttaaaatgactgagcttatttaatttatttaacattatgatgtaggtattattattatctccattttacagatgagaaaactgaagataagaaaaattctgcagcttgcctagaatatggctgctagcaaatgttgtaaaggaactcagatctgcccattcccagagcctgaggtcttaatctattctgctgacttaaattctgtatcatgagtttcacaacctgaagcttgggaactcctgtggagccctggagtgatgtttaaggaatacttcagtgagctgtacacactacaactcccatattgcattttagtttttaaaaatagtttctttaaaataaatgcaagaggggtctctgaacaatatgctcaggtctccaaactggctgaatttaccacggactatttttctagcatttggattttaacagaagcagagcaaagttgggatgaccacacccttcctgggcttcaaggactttaaaaatgtcctggctgccccagaagttggagagctctacatttcagcgttggtggtgtgtgttgtctgaatgaaatgggttaggggtagtggggagataagaggatttatagcctaaagaaggtcagggaatcccagtggcccacctgctttagagtctcaattttctcaactttaaatggaaatgatatcattacctatgtaatctgagtgttgttaaatgcattaaattaggcaatacatgtgaataaagcttatgagttattattttggaggtatttaatgtgttctcccctccttgacagtgggctgatattttaccatcctgtttctaaggccctgttaaagttgtttttctgagcgtgctctatccatcaggatcctggcaggaaacagatggtgcgctcatgctgggaagagtttaataaaggaactgtttacaaaagtgtgcgcaggatttaggaaaagcaacaagggatgttgcagcgccccagtagagggccattaccaacactaagccagaagggtggaaggaaaggagtgtttaccagcacctagagaggtttttgagagggctgcctgatagttaatgtggcctttggtggaggaatgcaatcaagtcacagaaacctaccagggagagatcttgggggaaaaatatcctgacctcactttcctccctccctttaatctcctgcaggtattctccactggttgaatgcaaatggaagccagaggaaaagggaacccttgacacagttttcatatagattggcctccagggcagacagcaggtgagagtggagagtggggctgggggacaaagagcaggtatggagcacagcatgtggctctccacatgtttaccagtaaccttcatcactcttgccagactggaccgagaatcaactcagcccataattatgctgtcgtggtgcctctacctccttttctgtgttttctcaatttccagaaacttattctccacttccaagctgtcttgtgttcttttgctcctctaagtcttcttattgtggaaaaatgaacacaaaaagttaactcacacacttaaatgtcttatgcctaattgttactttaaaatgtgcatacttattttcacttctgggatggctaaattgctaccagactgaccacagataaacaatacaaagaacaactatctgaaggtgagtaactgtaagcagattatggggattagttggcacatgtgtgaaaggataagacaaggtgtgtcttcccctatttatggtttttagcttaagagcaggccttagacaatgcccatagtctttctggcctgacgaactagaagaaaaagttgagagcagccagagccagaagaaagtgagaggaaacctctaaaagaagagtgccagagaggggagccccaaattccatgcatcaggtgcccaactttctggctgagtcccaaactttgtgtgcatgtggcacactgcaagcagctcagtaaagggtcaatgacctaactgagataagagctactgcccaaaagacagagtttgcagttttgtcaaaacaaaaacatcacactcgacgggagaagtgtaacagaaatgcagaatctccctaacaaaacattcccagtgtccaggaaaccatccagaattacccaacatacaaagagcaggaaccagattcctgacctattctgaagagaaaatataatcaatgaagatcaatcttgagatgacctagatattggaattaatagatgtagactttaaagcaactgttactacagtaattaaaggaacatttatatttttatgtgcttgtattagaaaagaagaaaagtctaaattaatgacctaaggctaccttaaaaagccaaaagattagaataagttaaatcccaatgcagtagaagagtagaactaattaaggtaggaaaagatatcaacaaaatataaaacaacattagaggaactatattggttataagagatgcagtttaagtataaagacacaggtaggagtaaaactgattcttgaaaagatcaagaaaattgatagaaccatagctagactgatcaagagaaaaagaacacaaataatcaatatcaggaatgaaaaaggggatataactacagatcctgcagacatataataagatgatatgttgactaccctttttgcctgctgatttctggacactaggagtccaacatgccttgtgaacaatcataaattatagttcagtgggacacttgctgtgtcctctggcgaaaatgtgcccttctagggtcaaagcctacagaacccagaattatgggggcaggaaggacagaaatcccccagtgggtcactgggagtgatgacaagtgtgatccttcctatttccaccccttggttacatgttcagtacactggaacatattcagagctttttgggtgtaaagatttgggtacaggaatactgtcattgagagcagtgctccaaaattccttccataaatactgaggtgtctccatcaccgtggccagattttcatatttttttcacccctggccatgtaacacacctcacagcagaccctttgcttgaacagcttatctgtttgcttcctatcacttctgcaggagaaaaatggagtggaatgggggcaagaacctagttctttctgcaggagagatagttaatgcttatggtgtgcatttttatatgccccaatctccctagcagttagttcagggccatgtgatttgttctggccaatgggtgtgagcagatcttctgagttgaggcagtgaagagccagtgtggttcctctgtggctctcttttttgggtatggcaaccttggaggccgtgtgttccagatggtgtagctgtgagtttcaggagcactgcccaacaaacagcaactttatgtcctgtcaaagcaacctttatcctgctaagcctctgagattcctggtttgcttgttgtgggtagcaagtgctaattaccttgattaataaatctattctctccacacccatcaatcaataaaaaattcagaaccctgattataaatgttttcacagttggtcagctaagagtttcttgtagattgctatgcatttagcattttgctgggttttttgttatcagtgcccactctgagtgggtggagccccctttcctggtgggttatggactcccttatatcagcagatgaatagaggttaagaagcatcacgagtcagctttatttagttcttatctggacatggacaaggttacagtctacccagatatgcagagagtattcagtgctacatactcaagctcctttcctggctaaatttctgttggttgctcccattcctataactggaacatcacctgttaatttcttaatgtatgtgcacacaacagattcttactatgtattctctgtctagccaggagcattacaactgcttccaccacaccacctcatttggctatctgagtcttcgggttaatttctgagcaattagtgctgttgtggtcattgggttttgttttgttttgttttgttttgtttttaggctcaatcttatcagattggatgcctcttgctttgaacccacactttgttgcctcacccttatgactcctctatttccctcttcatccttttattaaacaaaacttattaactctgtaatcagaccagcagcattgtgcaataggcacaaatgttaggtgccttacacatgcaattttgtgcccaactttggcagcagttgtttttattctgtcttcacagatgaggaaatggaggcccagtgaagacacaggagaagtattagtgacctgctacttttagatataatctgtatagagaaataatatggatataaaagaagttgctaaaaataatcgtaatatctgtatattgtaaaccagcagtccccaatgtttttggcaccgaggacaggttttgtggaagacaattcttccacagaccaggggcggtcgggggatggtttcaggatgattcaagcacattatattaattttgcaatttatttctattattattacattgtaatatgtaatgaaataattttacaactcaccataatgtagaatcagtggaagccctgagcttgttttcctacaagcttatatgggactccatatggggttgatgggagacagtgacagatcatcaggcaggcattagattctaataaggagcatgcaacctagattcctcccatgtgcagttcacaatagggtttgcgttcttgtgaggctccagtgccgccgctgatctgacaggaggcggagctcaggcagtaatgtgagcagtggggagcagctgtgaatatgatgaagcttcccttgctcgcccactgctcacctcctgctgtgtggcttggttcctaacaggccatgaaccagtattggtccacgtggcccaggggctggggatccctgttgtaaactacttaacattgctaagaaaaactaaagaagatataaataaatggaacaatattctgaattcttggaatgaaagaatcaatattgttagttgtctccaaattgatgtataaattcaaagcattcccagtgaaaatcccagaaggctttttttttcttttatctttttttttttttttggtagaagttgataagatgattctaaaatttatatagaaatgcaaaggacttagaatagccaagataattttgaaaaacaacaaagttgggggactcatactacctaattttgagacataaaactattgtaatcaaggtagtgtggtaatggtatcaagatggacaatatataagtagatataatggaaacatacatctcatgtatctggtgaattgacttttataaaggtttaaaggcacttcaacagagaaagcatagtcttcttaacaattgatcatccattcataaaaacaggaaaaaaaaaaagcagaaaactcctttgattcaaaccttgcaacatatccaaatccaaaagagatcataggcctactttcaagatctaaaaatataaaatttctagaaggaaacagaagagaacatctttgtgacaaggtattaggaaaaatgtttataaatcccataccaaaagaataaaccataaaagaaaaaaatataaattggacttcattcaaattaagaacctctattctttgcaagaaacttaagaaaatgaagaatatccacctattggaagaaaatattttcaaatcacatatctaataagacttgcatacagaatatataaagaattcccttaacatagtaataagagaacaaataaaccagtaaaatagggcaaaatattagaacaggtactttaccataaaggacatatggatggcagataaatgcattaaaaatgttcaatatcattattccttaggggcagattaaaaccacactgagatagcactacacatctgttagaataaagactgaccatagcaagtcgagggcaggaagcaactggaactctcatgtactgctgatggatgtgtaaaatggtacaatcattctagaaaatagctagtttctttaaaagctaaacatatagatagcaaataacccagtcattttacaggtatttactgaagagcaatcaaagtatgggtctatacaaggactgaacatgattattcatagaagctttattttaatagtcaaaaactagaaacaacccatatgtccatcagtgtccatcaatagatgaatggataaataaacggtggtatagctatacaatgggatacttatcaataaaataaatgaactattagcacatgcaacatgagtgaaattcaatgtaattatactgatagaagcagataaaaatgacatactgtatgattttatttatacacaaatctagaaaattcagatatttatagtgacagaaagcagataagtagttgcctggggatagggggagtggagagtagtcgaagaaaaggatttcaaaggggctagaaaaacgtcttgggatgatggatatgttcataatcttgattgtggtgacagttttataggtatatgtatatgtatgacgtcaaacttatcagattgtacttatataaaataagtacattattttatatcatttacacctcaataaaggtgctaatagcaagtaaataggggatattcattgaaaggcaggtgatgatagggtaaaacaatttagctttgaagccaggatgcctgggttactaattttttcttctcctcactggttgtatcactttggactggttaactcttctgggcctttttttctatgtctaaaatggagaaaactattccaacttctgtgggttcttgtgagcattaagttggtttattaatataaagcacttatggtactccctggtatgtaagaagtatttaacaaatgttaagaaattattatgcactgggcaccatgtgaagtgttttatgagaattatctcatttaaacttcacagtctctgaaacaagtaacaatccttatcctttgtaccaacatctaagtgaaaaggagaaaaccaagctgcaaagaggaggtttaacttatcccagattggttacacaggaggcaagaagcagaagccagatttgagtaaaggcagtcaaacttcagaacccacacttttaatcctgtgattaagtgctaacaggtggggcactgactcaagtgctaataagaaagttgtctagacagtgcccatgttttcagagcatttcattctctgagccttgtgaaactattgaagaccaacatgtttgggcagctttctgagagtgcctcttatgattactcctggcaatcatcttagtgctcatcaaacctatttcttcttcctgggcacagggtcaaactatttcccagccttcttgtatctggtgaggtcatgttgagaggtgacagcatgctggcagtcctcacaacccttgctcactctcggcgcctcctctgcctgggctcccactttgacggcacttgaggagcccttcagcccaccgctgtactgtgggagcccctttctggactggccaaggccagagctggctccctcagcttgcagggaggtgtggagggagaggcgcgagcgggaactggggctgcgcgcggcgcttgcgggccagctggagttccgggtgggcgtgggcttggcgggccccgcattcggagcagccggctggccctgccgaccccgggcaatgaggggcttagctcccgggccagcggctgcggagggggtactgggtcccccagcagtgccagcccaccggcgctgctctcgatttctcaccgggccttagctgccttcccgcggggcagggctggggacctgcagcccgccatgcctgagcctcccacccactccatgggctcctgtgcggcctccccgatgagcaccgccccctgctccagggcgcccagtcccatcgaccacccaagggctgaggagtgcgggtgcacagcgcgggactggcaggcaccttcacctgcagccccagtgcaggatccactgggtgaagccagctgggctcctgagtctggtggggacgtggagaacctttatgtctagctcagggattgtaaatacaccaatcggcactctgtatctagctcagggtttgtaaacacaccagtcagcactctgtgtctagctcagggtttgtgaatgcaccaatcgacactctgtatctagctactctggtggggccttggagaacctttgtgttgacactctgtatctagctaatctggtggggactggagaacctttgtgtctagctcagggattgtaaacgcaccaatcagcaccctgtcaaaacagaccactgagctctaccaatcagcaggatgtgggtggggccagataagagaataaaagcaggctgccggagctagcagtggcaacccgctggggtccccttccacactgtggaagctttgttctttcgctctttgcaataaatcttgctactgctcactctttgggtccacactgcttttatgagctgtaacttaccgtgaaggtctgcagcttcactcctgaagccagcgagaccacaagcccaccgggaggaaagaacaactctagatgcgcggccttaagagctgtaatactcacctggaaggtctgcagcttcactcctgagccagcgagaccacgaaccccaccagaaggaagaaactccgaacacatccgaacatcagaaggaacaaactccagacgcgccatcttaagagctgtaacactcacggcgagggtccacggcttcattcttgaagtcagtgagaccaagaacccaccaattccggacacaatgtgactagttcttgccaatgcaatgtgagcaaagcagtgtgtcatttctaggccaaggcaggtaagagtggatgggctttctcctttctctgctttccctacccatttctgctggtttgtgtttaaaatggaggagccacagcatgggagaagcctgcttcctgaaagaccacctggagcagagcccctattgctgacctgtgcagaaccatactttatgtgttaagtcactgagattctgagattatttattaaaacaagtaacatgacattgccaatgtgctactcttatgccagtatgtcactcttatgccaatacgttactcttatgaaatattacctttgctgaaacattccatctcttagaatttctaaaatatgggtcaaatacgtagacggactcttttgctaggagatggaccacagagttttgtagtagaagtttaagtaataggaaataatatataattagtaggagataacatatgaatgacacatggaataagagtttcaatatttatttatttatctgagatggagtcttgctctgtcgcaagttggagtgcagtggtgtgatctcaactcactgcaacctctgcctcccgggttcaagtgattcccttgcctcagcctcctgagtagctgagattactacatgtgtgcaccaccatgcctggctaatttttgtatttttagtagagacggagtttcaccatgttggtcaggctggtctcgaactcctgaccttgtgatccgcctgcctcggcctcccaaagtgtttcaatatttaaattccttccaagttacaatatttaaatatccttcatctcactcatggagtctgagtggtgaccagtgttcttcattccaattccctgttggcttttgctctgtgtgcatcctgtttcttggggctttagttgtgggcatcagctcttggctttccaagatccacaagaaattgcataatctctggccatctcagatgtaaaattatttccttgggttgttttaaaacctacccctcacatctcaaaaacctattcaatgggacaggttgccaccatctgtttttcaactgccatttttttttctttcttgctcgttggaaggtttgtcttctaattattttatcagcttccccatttgtgatgtgtcttctttcatactgtgccctgtctgtactatgacaattcatggtctgcagacagcgctctggttcctggcccacagctgggttgcaactccattagtctcccggcaccagagtcttctcttgggtttctggggttccaagtgagagacagaaaaagaacactcagcaccctggtttggggaccatctgtgacagcctgaacacatagcattatttttatgttttccctcttttctagttctgtattggaaaaaaaaaaaaaagaaaaggccagagatagtagcctttgtattactggagttcaagaggtttagggagaggacagctgttcacaatgctggatagtgaggacctcatgtcatcgtcatggaagggggcttgattctagtcatctggttctgagcacctgctgttttggcagacggtgatcgatcacttagcacagcacttcagaggctatccagaggctatccagaggggaatatgatcctatagccctatgctcccattttactgatgaggaaactgaaccctagagtcaaattgagagttcctcaaagatagtcaacagaccgaagccagtctgagaaccacttactcctggtggttggaatatagaaagtgacagtaagtttttaaaaacttttatggtaatttgacagagaaattttaagtcatctaggcctatatttcatatgtctttaaaagaccaggtgtgttgtcatttgttttattttctataataaactttattttgggaacagttttagatttacagaaacattcagaagatagtacagagagttcgcgcatactctgcagtatcttatagatagtgtaagacagtaaaattaatatattacattagctacaattagtgaaccaatactgatacgttatgattcattgaaattcatactttattcagatattcttagtttttaacctaatgtcctttttctctttcagaatcctatccagcgataccgtattaccactaatcatcatgtctcttcttgattgtgacaatttctcagacttttcttggtttccatgactttgaaagatttgaaaattatcgggcaggtgttttgtaggatgtccttcaattgggatttgcctttctcatgattaaactgggcttatgggtttgggggaggaagaccaaagagctgaagtgccattttcaccacatcatatcaaggctacatactttgcacaggacttatcactgttgttgatgttgaccttggtcgtctggcagaggcagtctttgccagttttctttactgtaaagttatcttcttccctgcccctactttcatactatgctcttttgaaggcagttactatgtgtaggccacacttagggagtgtggagttgtagtttattttagtgtacttgacaagaaattggtttgtgatatattgaaagtgaaaatggtcctccaacactgctcatttgagaagcactgctctaaaaaccctgtgtaagggcacacagaagaaatgctgggacagagcccaaggcatcttggcttcagtcccaggtcctgtcattccccagagcctaacttgtgcatccatctaactgtggggccaatttggctggctctgtaacaccacagactaccccctaactttccatgaatcttaaggagtgcttcaagtcttggtggacgtttctggaatactagtttcctcaaaccttgatgcattcatttgtcagagttactgttttaggtcaggttcaatggcaaataggttctgagatggagatttgtacacagaaaattcttttggtgggtgataggagaaggacaggtcagaaggagaagtcaaacgtcaatgcagtccaaataaaagcccctgccaatcttacggggagctttggacctgggatggccgttcagagttgctctgaaattaagcagaaagatcaactttgactgcccccaccccaccccaccaaacccacccaacacatacacattgaccaggtactggattggatactgtctgtctttgggagggaggtgtcactgggaaacgtggcccccttagcccatggacataacttaaaaaggaactcagctaagccaccagaagtcaacacccctggcagctgggggatgaatacttaggacctgatgagagatctggatggcaccctgcagcacttgccacagatacgattactgtttttaattcttttgcctttgtcttgtgtctagattccaagaaccaggaggttgtttgctgtactctcccttgtacagttagctgtctctagtgcctgaatgcactaattgtcctttgggtatggatgaggtaatgaaggaaagggatgctgggaagagaggccacatgagaaggttagtgtgggtgtaagacacaatgcagaggatttgtatttgtgccatctgcctgcttctatgattcatctgggtctgtgcacccttgtaatcagcaggctgcagcaaactaagtgttgcttgctaaagaaaaatgaaagctggaatttcagcagggaagaaagtatatgccccaccgtgatgagtacaaacacacagcatcagggaagccacacagaatgaagctctgagaagactgttagcattttccctccacgccccaggggaaaaggtgtaagtaacagaattagtccaattggtcaagaattcatctttcctgtcacttgtctcttgtgggagttcaaacttactcagtcccacccattttgattgagagtgaaaagaaggacattttaatttaagagcagaagatggaacttgagggcagaacaaatttggcaaatgtaaattcttatccaaaaagcatgcttcctgtacttggcaccttgtttccccgattctgcctgatgtccatctctttttctcattgcagtttgaattcaggcatgtgtctttcctctcagcttcaccatgcataaggggatacttggcacgaatgagctcatcctggctgataggaaaatcttataattaggcaaagaaactcaaaagaactgaagcccttttccctccatgagcatctttcactaactggcctaggagttggtgcctaccagttggattatatgtagctatggggcaggaaagggttaaaggatttagaaagaattgaaataaaaatgaaaattttttccctattaagatagcagaagttcgaatgtgaatcactgttttgcataataagcatggccatataataatagctaacattgttgagttctttcttagtgctgggcactgtgctaagcactttataggggttatctcattttatgttcatcatgactcagtattgtggatattattacaacccctcaagacagatgatgaaactaagacttggagaggttaggcaagttgcctaagtgtggagataaaattcaaatctaggtaccaatgtttttgaaccactcctgtactgcttcagtagctatgggatggggatgggggagtagtttgaatgggaaaatcggaagtgtcctcacataggcctcctagggaaaagcccttctgaaaagcatcctactgtaagtttccttcttgtagcttagaccattttcttttgtgctaacaagagagaccaaagggacggttgagatctgaaacttaagtcagaaccttaagattgaatttgggacctctgatattgactcagagtctgtggcatgaagatgatgaccaagaccatagatttggataagattgttccaagaggaaacgtgcaaaaaggaggttaaagagttcaggctggatttttgggaagccaacatttaaattaggacatgtagaggaaaataagccaataggaaggtccagaaagaagagttaatcgttctgtggtaatccaggagagggaggtgtgtcgctatccagaggcaatgaggcaaaactgtcagcttggatgacatcttgtcttctaagacaggggaggtggaaggaaagatcagaagaaaggtgactacattagaaggtggagaggaagcagagttaaggaagtccacgccagggcctgtataatcttaaggaagtagaatgttcatttctttggggttttcacactcaattccttccttccccaagtacgccccaggtgacactcaagcaggagtacctcaacccaagagtaatccagctgttgaccttgacaaaatcgtgttggcttgacagagagagagaaagctgtgtctgtgcctttgctgggaagctggtgatagagaccatggctgcacgactgccagctttcatgtggctcggttgacaggggtttcaccctctgatgaagttctccaaactttcttggaaaaccagctgggcaggtttaccttttgtctactgccttggatggatctcatttctatcctagtttggggttaagtattttctggctgcctcctgcccttggagcatccagagacaggtgacatgtggacactctgctcactcctctttctactgggaactttgggctgaggccaactcttgtgagtgctaaagtgcttgggggttggcaaattcaaggtaaacactgcctgacgtcagactcctgtgagatatcctacatccagactcccagagtgggagcttgcagcctggcaggtcttcctttccttcagtgctttggtgcctgcctcatttatgtgactgttagttgaatattttgtactttgaaaatatatgaaacctattagtcagtggagtaggattttagcactccaatctctcattttatggacagagactgaggttcagaaaggattgacttgtccaaagtcacatggctggtttgaatccaggtcttctggttcctagtccatagcttttctcatttttatcatgcaataaaaggtagctcatcacagaaatgtaaagagaaagaatggcgacctctctcctttcccacaattcttaccagttttgtatctcttgctcccagttagacaggttgtaattgactttgtctcttcatggaaggatacctgtagctcacacccatagctaaaaccaactcaatcccttgaatcatttctatttgcaatctatttctagatttaaaaaattagtgaacaaatctcttctttctgcagataggaatatacccttagggcaacaatcctggagaaatttgacttaaatttaaaccagattacaaaacactggggacaggcattggtggagttgggatgagattatcatagtagctcagcgatgagtgtttagcatagtctattctaagtttataacaacgctgggcattgttctattttactgtacaggaaactgggtcacaaagaagttaagtaattaacccaggtccctagggttaattatgttaattaagtgtcagtgctggatttcaaatcttcatttaactggctctgatggctgttctctttctactacccagtggttctctaacttgatgtatacaaattttctgagaagattatttaaaaagtagtttccacccaatccaaggattccgattcagcagggctgaggtaggttggagaatctatattttaaaaaatgccctcagtggttctggcataaagtgttgggaattcctggaggaaaaaaacagagaggtggggggcagtgggtgcagatggcagcttcccctctttgacagcttggggctaggccagacactctccaagtctcacagcctccctagacctggtcaggtgtcctctgattgcaaagggtgggaagcctcggcaagctgtgctggaggaactcgcattaagacaaggctccccagcatggaaatcccaagttcacccagaagtttcaaagttagggatgtagttccttctctgttgttttcctttccaaagaaagacccatttccaaccatactctaagcccagaggtggacttttccttgtctctattcttagtgttggcacaagttgctggcccagggaagtgcccagtgctcattgaatcatgactggtggagggcatgctcaggcgttcagtcctggtgagttaggttcaagggcttccctttctaagtgtctcctgtttgagagttacactctgtatgggggctaccctttggaatgtagctctaaggaacacatagctgagggtcccaaagtaggcagttttctaaggggcatagagatgagtgtgtgtgatagtttttatcctccctgatattttacaaattgaatctcatttacttgtgggaaaatactatagagattaaatttctaatctagccagcctgtaattatttcttttctttagccaatcactgatacttcaggcggctccttcccagtccagagtcagcagcaagtatcattaactcgccttctaatatttctcctggataataagacaaacaatcaggagattccaagagcctgaaccctaatcaaagaatccggtcttctggttcctcaatatcatcacatgccctagggctctaattttccatgcctacaaacctcaaaactcaagtaaaggcctctgatgattttccgtaatgtgattccatgtgttatagtattccctgctcagctcccacctccaaatgtacactacatttaaagtaagccaacatgcacagagagacaagataactcaccatcttgatagtcgaaactttatcatttacctgagtttcctcctcctcacccatgtcatccagaaaactgaaaatggtccaggcacaaattaatgaaacaggtggatgggaggcatgaggtggtcatggtggctgtggtgacctggcgggagtatgcgctccccaaaggaggcaggttccatttagacacatccagtttattccaggtgataacataggcaaagggctggcaagtgttctcattcttcaggagaagctgcaaatatgaatgagatctccagatttaaaagatgttggtgttatagaccgcctatctttccttccttccttccttctttcctcccttcccttcccttccctttctttccctttcctttcctgcctccctccctccctcttccccccctctttcactccttatttccttgttctacaaatattatttatgtactccccaaaattcatatattgaggccctaacccctctaccatgtgatgataatggagatgggatctttgagaggtaatgatggttagattagatcatgcaggttgggccctcatggtgggattagtggccttataagaggaagagagagagatcttttgctcgcctcgcatacattcactgaggaaaggccatgtgaggacatagtgagaaattggcgactacagcgcaggagtgagccctcaccaggacctgaattcactggcactttgatcttggacttttcagccttgagaactgggagaaaacacatttctgttgcttaagccacctggtctattgtattttattagagcagctcgagaagactaacacagttgatcatgagtgctggacaacaaattatatccttagatcagatgattgctgaccatttgcctgctttgttgtaaaaagggcattaaaaaatgaaattagggatggacgagtgggtacaaaagggagaaggaattaacacaattttgaggtatcagcaggtaggtagggctggttggttgttttctaaacagctgtgctcgaagtaatattttagcaagataggggctttggagcctgcttgggaaggctcagtttccttccttccttcccttcccttcccttcctttccctttcccttccttcctttcctttcctttctttctttcctccctccttctttcccccctctctctcactccttatttccttgtcctacaaatatttatggtgcactccctccctaagcacctccacccccccaacccctgaccaactgcactaggcccctgagaatacaaaggagcaaatgacttggtctttgtgtttcaggagctttaggttccctagagctctgatttgtctaagtggagctgtgaaaggagggcaagttttccgggccatcatttctgcacccttgtcccctgggagttgacatagaactagtggctgctctgattcagagtcaagtgagaggaggtgcttgaatgctgctctcctgtatcaacatccccctcctaatttagatcagaattgattctttggttgtgggcagcatggcagaggggagaaggttcagagaggctgcattactcaatcgctttccttcgggcaggttggattgtgattgccatgaagtgaaaacatccataaccctgagtggtcatgggtttgagcatgtgtagccactgctcctataacttggctgctggtggctggtggtaaccaggacaaagagagaagagactcttatgttagagaaatgtagtgtttataataaaataaaccttatagcatttctaaaaaaagtattcaggcaagtaaatgacagtcaataaaccatctgctagtgaggtccacccaaagcccattcatgtatttactcagtaacctatcattgtggagggcattggattaggagctgtggatattggtgattaagctgcaggtcttgcttggtctggcaattgaaaaactgatttttccaaatactgtatctgcatatcttggcttcatgaagataaggacctgtggctgcaaaggtctagggggtagagcagagggcttctggcatttaatctctgttaaaaatacttttcaaaatcattttaccagcatatcaaagctgtaaaatatattaagttaaatgagaaaaaaaatcagagatgtaactgttaaaatctagagtattttagttgaaagactgggacatgaaaagtaaattttcaacttgagaacactttgtctcagggaggtttaaaaaaaacaccttaaaaataacaagagcttcaaagcaagtgtttttatcactggcaaggcaggtggtcccacgtttattgtatgcagggttcagggaagcttaaacttaaaatttttaatgattttttaaagttcagctaaaagacattattctgggatagaaaaaagtctatttattccactctaggtactccgaagcagggtatggattctgctttcatctttcaatgcaagcctgtttccacagggttgagatctggcatggacaatttcagcctgaaacgattacttttggaaatttgcagtgagtggaaacagtcatgtagagctgtggatcttgctacctggatcaataacttcttctagttaagcttcttgccaaggaaaagcaaggaatatcaaatttcatagacctaatgaaccactggaaactgcttgcacccatgtgtgcaaggatcgctttttatgatttatacaaaccaaagcactcattggaataagaataatagctaacgtttatttatcatttattatcctggccactgtgccaagtatttatatacagtgagttatttaatccctgcaacaacccatgggtaggtactattatttttccttctttatagataagaacattgaggcacaaaaatgctaaattacagagtgggatcaatgtgttgctcgcttagaaaatgagtcaagttccatatgtgtgagtaaatgtgaacattcccacttccttgtcacttggttttctttctcaagtttggtgtgtttgctctgtgttcacaggatattgttaacttcttagtcctttgaagaaaaatcaaattttttcttaagaagagacttttgaaactcacaatatgaattcaagaagcaaaaaagaaaatcgaatttcacaaatgggataccaatagcttggaaaaatccattgcttttgcagggtttgttattgagggaaccctgcctttcccagcatccttaacatttcttcctcaaataaaaggtaataaaatgcaaccaactgactcattttctaagtgaatgacatatttactctactctttaagtttaaactctaaccaattccccaatccttagttcccatgaaatgtaatgttctcttcctaaaatgtttggccaagttggggaaggtgggcatggcagtgtgagcctgtagccaggttccaaggttcgcttgaggttaggaggttgagactagcctgggcaatatggcaagactctgtatccacaaaaaaaaaaaaaaaaattaaaaattaaatgtttggtcttctacaacctggctttccacttctcattcccaatcatgctctgggaccacctctttcctgtgctgaggaaggctaaggaagcactgtgttctttgaacacagtgctcaatccatcctgcattgatgcctttgctatgacagtttcctctggtctcttcctcctctgagtctagcttgagggccacttccgaacagctgcagagttgagctgctcctcggtacacttcactgttgaaccaacctgggccacaggtgttgcagtgaggttgtcttcagagcctcaccctacaggaagaaagtctgtgaagtttctggccctggcacaaagctgcagaatcttggtgaatcaaacaacttctccaagcctcaaagaaggcactttaaaaattgtgaagcactaactgaaggagaggagagtgtcaaggattccatcctccacttactagtagctgtcttattcatttgggactgccgacccccagatagccttcatccctggaaatgtgcctcagatgcatgtctcttcacatgcttgggccttccagaatgtaccaaaagccagggttaaacaacgtcagctggatgaacacatttcagtggcaaaggctgttggaaactaccactgtgttacatttcactttaaactcctcaccttgaagtgaagctaagtcaggccagagaattgaatggatttgcccttggccacagtatgaggtggtggagtaagcggaaggagaatgtggtatgtgttgcaggctgtcagtatttgccagactatggtcttttaaaaaatatatacatacattgcacaaagagtttggcattataaaaagaatcttttaagtaccacagtcttttatccagaacattattaagaactttttattaaaaattaagatgcctcagaaaccatataaaattttaacaggctctacctttccacttcgccttttccagggcacctcaggagaggtggtagaattctcaaacatttggagagctctgcgaggaacattctactttgccaatttgtccctgtattggcccaggacagccatttaccaccttgtttttggttatttcagctgctgctaggcgttctccttcaaacacacctggattgctgtgaggacactgccccacaggcggaacacaatgtgtttctcagagctgcggactgtgggctgtaggctcccacagccctgtgtgtgtgagcccgttggcgctcaccaagctcttctgaagttctctggtttcctctgacttctcttctggatgggaacttaggtacgggaccagtcccatatatattcatcagtgcaggtccctttgttcaactcaaatgagcaccacatggggttccttctttctgtgggcctcaatcccttctgtgcttgtcttttaaactaatctgctcacatggggagagtcttaaaatttttcctgaatgtacctctttttatcttcaagagaccctttgccattctagggtgctgtaatttgacaaataaatccttgtcccactttccccttccctggtttctcacctagatcctggcctttcgttcacctgccgtctttcagagtggagagtactcacccttcagtctcctattcactgcagtaacccaaattcccttctcttgggtggtctcctttatcactttcgtatttctctaattctaatagcaagacttcaggcccagcttgagaaagcatgcattttcctccttcatgttcgtacagtccattggacatccttaccatcagctcttgttggttgaaagatctgaaaactttcaactggccatttcctgaggttctcttttttgttcatggagaagcaactggagcccttcagtctgggcacagtcaggaattttctggattgctgccattattcttttattcagtaaacatttgctgagtcccttccatataaaagtcagtatcccaggggctggggatacaagaacatgaccaaggccctgcctaaaggggcttgcaggctggtgcgggagacacagtgacacatgttgccttctattggataccagtgcaataggttggagtgggagcaggatgtatgggatgctctgccccatgccagaggatggaccacctcattcagcaagggaaggggtgtcagggaaagctgtcaccaaaaagccctagttgaactgagctgcgaatcacaatgagtcattcgccaggcaaagtcagccagggcattcctggtggaggcagccacacaggcaaaggttcagaagtgtgcaagggggttgactatgtccattctttttatgaatgttgtcaaagcttcagtaatcttgcccctgtgcgtttcttgtctgccctgcaggcagaatgaactgtgagtgggttatcaggaaaggtcaaagactgcatggctggtgtgaggggctgtggggctgggccagggaagcgggagggaagggtgagtcacttgaaagttttgtgtgctgagacatggctcttaaaggagttctggggtttttgcagaggagaaagtgcttaaaggcagattatgcagccaacagtgagccagtaaatggtttcactggggcctatattgggacattttggcagccttctttattgggtttggggctctctggctatcagatacctttctgttctctccttgtgaatgcccgtgaggggtttagggtaaaaatgtggagcttttaagcatcttaatgtgatttcaattgcattttaatttttaataaaatgttgaataaagttctgctcaaagagccacagggatgagaagattctacttaatagggagcgtagtattttcatactgggagatagatgggtttaacaagaccctggtacatctctttcaagtaagtgcaataaatggttctgttggaatgggaaagaagggaggtgcatacatacatgcatatatcttatttttctgtatagccagtaattccactctttggaagtaaccgccgagcttttggcatctttgactaataccctcctcatatgatagctacactgctccaaagacggtacagacatctgagccaaacattttttctgttttgtttgcaagaaatggaactgacagatatacctgtctgttttgtttccaagaaaatgtcttgttagaaatgtgtgaaaatgtattatatgacagttgctgaaaatgtttcagatgcagcaataaactgattgtggtttttggaccagatgtgcaccatgtttagaatttattgtacttctctgtattctagcccagtgcttaagtaaatagagagaagtgctttgcttttcagtgagacttcttatgtgggtgaatggcattttcctccatttcatgatgggaaattataggaatcatgcaaattggaaatagtcactcacctcacacccattgtgtagcggagaagactcaaactaagggcctgttgtctttgtcctgactcctgaggttaaggagaagacttagcctgcaaacgtctatagcttaactgtgccgcattttctgactcacttagaaactaaagaaatgcacttaatgtcgattgtagtattttaaatccctgccttttgatctgatgcattgtagaacctagtcagaactcgattagttaaaaaggcaggagactttttcatgcatacccctgtgggactccaggcagcctttgccaaaggtgttagacatttgtttttctatgtgtgctcagtaaaataggcttctaagcatagaaatgatctgcgtgttgtgattgatctgcttttttacgctatctcatgttccatttcacttctagaggcacattgatttgaatagttaaagatttgtctcatttccttgccaaggaggattatgtttccagctttttgttaattctgggcatttcaaccactgcttctgataacatcctgctttactgtgctaggcattccttggacccaggactggggtaagacatggtcctgctgtcagggaagcagtaagatagttcatgaagggcatgaagtccaggtgcttcacacgggagacctcgtttaatgctcatagaaacgttagattttgcaaggggtgagggtgttaatttctttatttaaaacaaaataaaactgagcatcttgtagctcagagatgaggatccagaactaatagctgcttgactacagagctcatgccctccctccagctcactgcttgactggttgcatagtcaagacataacaatgaacataaggctagaaatttttggaataaaggctaacataggcactagagcattaaaatacattgtgtgttagagaagggtcattgtgtacatgtagtcagtgaaggaaggctttatggaggagaactgagctgtgtttggaagcctgaagatgaggatagaaatcacaggcatgaagccaccaaggaggacaagcttgcagggttgacaactacaccagattgccagggggccgacctggagagtcggggagaggggaataggaaagaaggggaaggtggagggcaggctgtttagagctccatgagaaactctgtgtgtgtgtgtgtgtgtgtgtgtgtgtgtgtgtgtcacatgtatgtcagaggagggtttacaatgtggaggaaacataccatttaactaaaaatcaaaatgtttgggggatatacgatgctgaaatttcccattgtagccagaaaaagtggtgttttaataatgagaatgtcatgtttcttttcctatgagggaataaaataagtcagcctctttgctgagttggaagtggctgagttgttggcaaagtgaacgaattccctttgagtctccgtgataaaaggaggcaacaggggaggggagatggggcaggtagaggaggaccagtgtgcagaccaccacagccccaccgtttgtctgattatctgaaagtgcttggaaactaggaagcagataaaaacttattaaagaaaagaaaatccagagaaaaaacctggggagcccagggagcatgcagggcggctctaaactgggatttgggatggggttatcttttttcccagagtacagcttttcaaacgtttccaacaaatattcacttatgctaccagggacagtagcataaagtatgaagggatgaaatatagtttccttgcttttttcctttttgcttatagggagatagctagcaacatttaatccaattttaaaaacacattgtagaaattaacgacgtgattttgtaatggagcagaaaaagaaaacctctaagatggagtgagcgacttagggatccctatgtagtcatcacagatgcctgtctattgataggaatcctgtttcaaacatggaatttaaatttaagagaaaggtgcacaccaaattgatgcctggtttttctggtggcttgaaagaaagtaatggagtttttaaaaatgtgtgaacaattgatatgaaatgctcaatgtgtatacaatcatttatgtggcaggcaatgcactgcatgctggagctaaaagagaaagtccgggggctttccatctattgagggaggcagagaaaagagtgatacaaagggattggtgctacaatatgcaacaagaggtgggaatgttaaaaaggattgatttactaagactggaaaaatcagggaaggcattatggagaagatgacatttgagtgggttttgcagtatagataagagtgcagatggaggagagagaagtgaaataaaggagaatggcaaggggcattgtaagtggaaagacatacaaggaaaaacttaaacatgttaaagtttaccttctacttggggaaaagaccacaggtccccttttcagattccctaaaactagtatttccctaaactagattgggaaataccactgtcactttgaagaaccactgaggttttttttttcttttgctaggagtggggtttaatctggactgaattggaggaaaggaactggcaccagagtggaggctggaaggatggtggaactgacactgggacagaacacagaaaacagaatctaatgctagtaagttctttgttatagaacttaactttgtgttgtaacccctgtctcctccactggcctacaatgcaagtttcttgccttagtcatctttgcatctctgtgcccaacacagtaggtgtattagtccattttcatgctgctgataaagaaaaacccaaggctgtgaaatttacaaaagaaagagttttattggacttacagttccatgtggctggggaggcctcacaatcatggtggaaggtgaaaggcacatctcacatggcggcagacaagagaagaacttgtacagggaaacacctcttttaaaactatcagatctcataagacttattcactatcacaagaacagcacactgggtccctcccacaacacgtgggaattcaagatgagatgtggctggggacacagccaaatcatatcagtaggttcttaataaatctctgttgaatgaatcaagggaagaatgagctattgtagttgtttggttaagagattccgatgtaggtataagcctctgtgggaatcttggaaaatgtaagactctttggggttagaaaataagaaaaagtaaatatctcaatcaggtttagacacagctttcacttttgatattgactctgataaagcaggatgattaatttctttgttaaagtgctatttcatgaggatgtattttctataaatcaccgataaattcttttgtccacattgaaatcttattcatatgagatagtgaaatatataaggaaaattactacttaatatatttaaaaagatggagaagtgaattagggataataaattatgagcctttcagtgtggactgacaattattttagcaagtaaaggaaacattttcttaatgcttatcacaatagatgtgagacaaaaagaagacaaatctccatttacaatttattttgctccaagacttcacaatgcaagatttactctaaaggcacaacttaaagaaaactagatgaatgtttcagcttgcattattaccattatcacattgaaaatggcagaagcatagtgccatcaactctgcttttgaaagatagaggtacccccactttagcttggccaacatcatctagacaaaatagacagcgagaccaaaacccgtggccaaaaccaagctttgtgaggctaaagcatcccagagcagtgtgttgggacagtgttttgaaatatcaactgagtatttttctagtatttactggggtcccttggttcttcttccattcagtaaactaggtcagtctggcttcattgtcttagggaaggtctgtcatagagcaagtgtagaaaaagaagtcaaatattgccttttgagttccaaaagctaggtccctctggaaagtgaagaacctggtacagatgagctaaaatacctgagctgtgagggccagttatccaccccaaagcaggtaaagattccttggggtcaagaagcatcagggagttgtggggacatatttggaactttctatgtgtatcatctctgagaaagaggactggtgcccagtccctacccagactgaaccctgggaagtacaattccagaacccccaatagaattgtgggagctgtgtttacccagggcctgggcctcagtttctgggtagtgctcaaagaagacatggttgtatggcgatgaagggccttcaatagcaccagtttccatgggaagaatgattctttgagccaagtagatgggtttttgaatggccccacagtttctcacaccccagcatggtgtggagcagtgagtgaattactgggcaccagagaggagtgcaaggagaaagaagagcagaggcaaaggtgggaatgtgggctgggcagcagtgaacttactgcatggtagccaggaccaggtgggccctggggcatcgaagcagatgccactgtgcttggctcaagatgactgaggacccaatgtccaccaccccatccctgcctgctcagccctgctcaacccctagaatccccatgtgactgagattaggcttctgctaccttgtcacaggcatgggccctcaaaatagaaattcagctgtggtatggaaaaataaagttacattttttgcacacatgaatctggggactgagattcaagcctgctctttgtataataaagaaaagttccatttgatgaaatctgattaagaatggacacttctctgtcctgcaaagatcagtatgcccttaacctctggcaaatacaaagatgggtttgttgaaaaaatacacaaaaatctctcagaaaccaagcagaagagtaaagcaggatctgaggggattcttggaaagttaaaaatgaacttccttctctgttgtaacgggctatgtgggctctttgatttttccctgtgtgccttgcctgtccctcttcattcctagagtcttctgccactccagcctgcacagagaccgtgatggccttcccccagcgtaacacctgttctgttctagcagtgacctcacggatagaggagactcttttgtgtctctcaggtccgtgtccacatagcaagaatctgattggctccctgtggtcaagtgtatactcctggtccaatcactggctggagtgttttggtgccgagtcacaaaccatattccgagcagtcagggcagggctgccatgttgcacaactgcaggttgtgcctgccaaacaatactctgggagcggctcccctggatatgtgtggtgcttatcctgcatggtgagaggcagtggtcctgagtaaaagtcctgctctcctggttagcaaatgtaataaaatggtggaacatagtgttgtcgctgtttgaattgagtgaatatcttcctaacatatgttgagtggccatatgaatgcatggagcaggactaagagagctgaccttggcatacagaatattcatggtgggcagatgaggctgcctactcaggtggttcactgtttagcactgtggtttggagagcaagctttgatgttcaacacacctgtgttcacatcccaactctgtttataaaaatgtgacattggtcaagttacttgatttctctgtctcagtgtctttatcaataaagtgggaatgaaaattactacaggaatgctcataaagattaaaggagtcatttaaagaacttaggccagtgtctgatgcttcataagtgcccagtaagtgtcagatgtaacttatgtcattattatcactaataattctattactagtgaattatttcactaatttttccactaatttatctcactaattatttcactaattaattttaattcttagtgaaataattcgctaattcactaatatatcactaatactagaattattagaattatagtgaaatagaattattagtgataatataatagattagtaatatattaatataatagaactattagtgatatattaataatgtaattagtgatatgttactgaattattagtgaacagttattagtgacttagtgattattagtgaattattagtaatattttagtgaatattagtgaattgtaatagaattaataataattctattattagtgatataagccatatgcattttacagtcttaaaatgttaatgacccattatatgaaaagcatttatttatctgcattcaagatacatgtttggttaaggtccttgtaattaaaataaaaatcagaatcaccatattataccaacattgatacaagtaataattaacaacaacaatgatgatgatgatgattaaaaacctggataaaattttgtctcaggcttagtgtggtttgggtatgcatgtacttatcatatttgattttgattttattttaaaaattttgtctttactttttttcttagcatcttgacccttttgtgacatctagcaggatgtatttttttttcaagatgcatgtttcacaaacaaaatatatgtttatatctgactgtacccaagctgctaattatgggcatctctttctatagctcactattaatcactcatgtctttggggttatatagaaaacaatttatgttacaaaatcaaatcctcccttaaaaatgtttgccctggaagtgaggcaggaggaaatcacaaactgttattattttcccttagatggatctaaatattaacattcccttagctttaaagattatttttatgccgctcctttataaacaattgaagttcactaactcttctgttgtctcgggttctgtctacaacatatccaaacaactcagctaaaaaaatgggcaatcagttcaacaggttatttggcattatatgtagaaaataaaaatgtttgaatagcttaaaacattttaaaaagcatagcatatagcaaaccaaattgaatgtttaaacataggctaaggatctctcacacaggggagggagttgccatttttagctctcattgcaattgtattaactacctaactaccagggcaacaatagcagccacagtggcagtagtagttacagcaggaggaggaggagggagaataagctattaatagtatgaacaacagtagtagttgtagtgattgttgtaatagtaacagttaacagcacatgtacacattgttttaggtacttcatgtacagtaactcatttaatctttacagcaaccttaagagatagtcctattatttctccattttacagaaaaggagattaaaattccaagaggtaaagtcactagtggaggaaccaagatttggaaaacagtaataatggctgacatagatcaaatattcatgcttctcagctactgacacgattaccccgttgaaccctcacagtgagcccaggaggtggatttcttcttatcctcatttaacacagaaggaaactgaagcttggatgtccgcccgatgcaatgtcagacagggtctgaaaccagggatccaaagccagaagtccagtcttgctttcagtttgattgtgtcttgcagattctgcttggaatggtttgctgagggaagagaactcctctaagtagaagctgttgccttgaggggggatctgggtacccgcctctccctgaggagcgttctcctactgcctgtcttacaaagagagtgcttttcttctgaaccaccccaaaagactcccacattggagggtgaggcagtggggtgagacaagtgaggtacttgtcctgggcattgcatttcaggggacactaaatatgcagtaatcaatataaataatattttatttacttatttatacatttttgagtcagggtctttgtcacccaggctagagtgcagtggcacaatcatagctcactgcagcctcaaactcctgggctcaaatgatcctcctacctcagcctctcaagtatctgggaccacaggtgtgcaccacctgctgggctaagggataagtaatattttaatgcaacatttacaaataggtaaatattaaacacttaaagtacattttttaaaaatcaaaacaaataccaaaaatatccacacctgaacaagatctccacattgaacataaagacaggatcagtttggtcctgggtctctggactcctggatggagaccaggtgggcaggtgagcctggtgctgtcctcaccccacagggctttcttgggtctcgagcaacatttgggctcctctgtgcaactgtctacaccactgctcacccaggcctccatcacagtcaccatgatgatgagcagtgcttctttaggcatcacgtcaccaaaacaatatttcatcatgcagtgctatttttaaaaagtgaggatggcattttccaatgatatgttagaagagttacacctcttccctctccaccttttctctccagaacccaaccaacgaagttgtttaaaaaagaaacagtcaatgccttttccacttttagatctgcatattgggccactcttggtttcttttttcttatttactacttgagggtgtcaatttaagaaaactcagctctcctaccagcaagtcagctgggacacatgtgttctgttcatctcttccaaaggcactgtggaattgtccagtcccagaggccttgggctttgaggacgcagcccagcagtcgtggtgctgaatatgaatatagtggcttcccaacccaaaagacatttcatttattattttaaaaatattttctttgggctcttttaatcctcagggatattggcttgatgaatagcaaataaattccctaaccagactgttgttataaatatccgtggcattaattcaaaccatttgcattggaaactttttttttcccctggaggaaaaggggtggctgatttaacctcaacatttgggacacgtttttccctaaaataactacaacatccatcatttttttttcctgctggtgtgtcaattttttaatgagaggctgggtccctttagtacctttggtctccatagtaacaatttcatgtgtttattctggcttactgaaataaaacactgaggaaaaggtcagtgactcatttttgattgggggttgctctaattagaggatgattatttaaaatttggtctctaacacaaagatactatgtgcttaaaaataagaccatggcaagcattttaaatgacaaatgatgaaacatttagacagtgagaggcttcccaactatgggtctttcttcacaggtgcaggtgttttcaagattattattgttttcatccgtatttaactgaccttgacttcttgccattccctctctggtagcaggatctgagtaatgcattaagtaatggattaaagtgtctagaatgactaatgcagttctaggagtcaatttagacctatggtatatgcatctgagatgagctgaatcaatacaataaagtcctctcagatggccactgagtggccaggggaggcataaaccttgcctaggtacagtttttctatccccttggtcactgcaggttttggatctgtaggaaggcagaatggggcatgcagtgctttgtgattgttgccttgggttgccattgccattgtttgacttaacatgtgtcacgcctttcttttctcatctgtgaagtggcaataacagcggaagctgcatcgtaaggtgtttgagtggattaaatacaataatcatgcatgcacagggcttagcaaaaactagaccctacttaggaaataccgcagcagtgttggctgttttaattattcttttactttcattatttgattggcactttggcctttggactgagttcctttgttctcaagggaattgcttaaaacgaaggtaagactctggcaagtgaagtttccaccgcagagagtgagaaatcagtttgagcaggtgtggatgtggcactctgcagggaacattctgtggggaatactgtcctccgttagggctccatgaggctttgctgtgtcatggctgagagctgagggctgctttgtcctctagaacccaggctcccatggactggctcacaggacaaagggcagagctcaggtagtggtcctcaggccctatctggttgaatctccatcaagcacatttctataaaatacaaagagatgcaaacttggctggcagaactggaagacagctacacccgtgtgaccccatattgtggcctaacaggatgactccatgagacacggtgaaaccaggttgaccttatgagtgcaaattgtgtgggcttgcagagaaaagctgaaaagtttagataaaattctgggaatttgaatgatgtgtttttctagttactcttgaaaatcagtctctttgatgggtcctagtaaattttagaccttagaagccaggccttaattagggaacttcacccgtccacttaattaacaactattcatggctctgtgtcaagcacgtgcttagtcagctgggacaccacgattctccttttttggagcttacattttaggtgggagacagagacagtaaatgaatgataaaaggaagaaaattactgtaaaatattacaagctatgaaggaataacatgctagagaacatttgtcagactcttgatctttctgtgttgcagctaaggatggaaataatgttctgtggtaaagattgtggagtgaatccttctcattaagtgttgataccagcttggcctttcctcttaggttgtacaattggactgagcaaagtgcttgctattgctgttcttattttagttgtgaataacgatgttgctagggcctaagtctcttctagctgttataattactatttttattctcattgtcagaaaacacaactttgcaaactgatttactcacagactgctttctccttgcccccggttaagtatctcgtgaattttgtgtttcccagaacacattttgggaaacagtgtttcagaaaattcaattctgatgggcctgtgttatgaatttccaaagagtagtaagtatgtcttcaaagagaaatattccagatgagatatctgcgcttgttggctaacctaggtttttgaatgcctgattaaggtcacctatttttggctcatcatctacccccattagtcaatgttgttgcaaactaaaaatagtccctcaaaacaaaacaaaacaaaacaaaaacaagagatatttaagggcaaacagataaattccattgtacagtttaatgtaaaataaataaatataatgtagccttgtttctaaagtttgcaaaaggataaaatgatacagaaattcctttggggaaatactgtgcatgtcaagacatgctgtttctcttttccatccttagactattttagttcttaaaagatttgcaaattaaattctttgcttttgtatttttaaaatattataataggtgtaaagagaattgattggtacatgcacttggctctctgggatgtgggggtgctgtcagaggctgttggctatgtcccagggtaattgaatgccaattgaggagacttgaattgaagctaactccaccactttctagcttttagcaagcctcttaaactctctaggtctttttttttttcttctagaatgaggacaatagcacccatgttactgggatgttgagaaggttaaagtgagataatgttatgtgaaagtaccttgcaaactatcaagtctgaaattataatctggtttagtctgtgcacttggttgtcattgcattgtattgggagaagactgttattggacctgggctgggtgattaagtcccgaattttgagaacaggggacgaagcatctctgaaatagaacggaagaaggaaagaggaatggaactgcatgagtattagtgtgggaagggaagtggatattcacaagaagtaaggcaattcagggaacatgcattttcattgagcttagggacagaacagaatatgtactcactagcatatttttttcaaacatgtactgaagtagggtgacattaggtgagtaacgttaggttaaatacagtaattccattatccctgaaaaacatgttaaaaagaaacatagttccattttcagtaatgcggacaaacaagataacctgaagccctcctgctaaaaacacttggaaatgccagctagaccataacagacatttttttaaagtgcatagttgagcctcaagaaagtaaaagaaatacccagggatacaaaatagagaggaatctgaaaattagagtagtgacaggtaggtgttgttttggctgccttttattttcagtaattagagagtttgggtttaatagccttgcaggttcttagacaagccatgaggctgtcaagaggtgagttgttggacctgagatccctccctgcacatgcctaaaggtgacacccgcgaatcctgttctcaactacctgattgctttgagtctctctttcctttcacccattctgcaacttattcaacaaatattcattcagtattttctctgtggccagcactgctctaggttttgtcaaaggggggattctgatcattcatacctcactctgtataagccaaggtatgattgcttaacaaagtgttttgaagactagatttctatacaaacctgttacagtcctataagagttgcatggataaagtgctgatctcagccctgctgctccttggtgagaccctcagccacttctttaacctctccagcaggagctggcttggcttcaggatatagggtacatccttcttactcctaggaaatacttgttttcaatccccctgggtctcagcatgtgccttctcattcctgagggcagcagcctttataagagagtgtgtgaagccttggagacccatgccaagagggtgggctttcaccagaggttggctcctggactcccagtcaccccatatcttcatttcctcaggaactgtccccaccaccactggctaaggggtctgatggatatcatggagagcccccagagatgtgaggttgtttttcagatcctagaattggagatagaaggaagacaagagaagaccaatgagcttgacctgtgaaattcaagagtagagggtaaggagaactctgagagccagagtgttggcaccaccatccttgtgcaaaggttgatcatcaccaggttaatccttttgaagagaaaggcacaatgcagaggagccctccccctcccactgctgaaagtctggcaatgtcagatacagtccagttcttataatttggggtgctgtagggctggctgggatctcaagtgcctgctttgagacagagtaatgaaacaggaacttgggggagttactctctgaacctcccatgggggatggagtttctctcatagaggccttgctgctggagtctcaggcctgtaagaagaaattctagtttttgagtaatttaagtggtaactttaagttcactgagagttgcactgaaggccaactttttcctctagtgtaattattcaagagcaaccatttgttggcaaaaaaaaaaaaaaaagaaaaaaaagaaaaagaaaactgtaaaggcctgggctgcagtagttggagcccatctgtctacggccttttttcaaagcttgggaaaactgaacttgtggataggctcagttggagtttgggtcattggggaaccatggttgacaactatttaccgttcagtcaagaatatgttttcaggtcatttgttcagctctgtggttcccctttggggcatgggctacttaaaattttgtagaaaaataaatccatctccctttaaagactggcctccttgtttttgttagaagccagcatagattttgacgccagacaaatatgtatctgtacgtttgggcattgcaacttactagttatatgaactcaactatatctcttaaattctcttgatttcctcacccttaagatggggatgcttggcttgttccaacagaaattggatgtgttgggattttggtaacttctattttgtgtgtgtgtgtgcttcccaggacactttaatacaaagtacaaaatcaggcttactcttagctccttgttaatctcttctggcatgcaaacagagaggtgaagttcaagggtaggggtgtatagtaagtagacaaggaccctcaagcctagctatgggactgggggaaactgccatacagagcagcaattttctcttggaaatccatactcaggacttatctcagagacattgtccacagataatgctcataacaactaaaaactagcagagcaaccagaagtataatataaatttggtttgacagtgttaaatggcacttggcagaatcagttctacaaatcactaggttaagcaatgttcaatacaagtttggagtaaatgaatactcactatgcagagccaaagattcatttatatattcattcactgaataattagatatttactgagccactgccaggtgccaagcccagctctcaatacagggtgtgtgttagtgaagactgcagagagctgccctcccagggcacagttccagtcagggaaacagacaaattaagaaataaaaatgtgacataataagtagtgataagatatttgaaaaaaaaaagtgaagcaggggaagggattagggagttgttttttttcaacagagaggccaaggaaggcctctctgaggagatgatgtttgatcagagacctggatcaagtgaagaaatgaccaactcatggggagatcagaggggagcaacaccaatagccataaaccaggattgtcccaggaaaactaacacctgtggttaccctatagaccaaggtgaggactttggattttattctaagtgtgaggagaagcttcagggagggacgtgatctaatttgtgttttaaaaagacctctctggaaggtagacagcagacacagggaaaccagtgaagaggccatcacagaagcccaggtgagagataacagctcagcctcacattgggtttggcttacacctttttttttttttttttttgaggcagagtctcactctgtcacccaggctgtagtgcagtggcgtgatcttggctcactgcaagctccgccttctgggttcacgcctcagcctcctgagtaggagtagctgggactacagtgcccgccaccatgcccggctaatttttttgtttctgtattttaagtagagacggggtttcactgtgttagccaggatggtctcgaactcctgacctcgtgatctgcccccatcagcctcccaaagtgctggaattacaggcgtgagccaccacacctggcaggcttacatcatttttattagactctacacagaactcatcctgaggctcggccctctcattctttcccaaagcagaattatttgccctcaatattaaagaaaattagaggatcattgattccaaggacggtactgggccggtggaggatgtgggtttccctgcagtgtctcactgccctacctcccttgtcctccccgagcagcataaaggtctcaacccctcttcgtgctcttcattgtcattgtagattattggttccagaatggaatgtcctctccttttctctttctgtttgtaaatcaaaaattccttttgtcttccaaagtaactttgagcatgcagcaattgtatctctaaacagccccatcagggacattctgtattttgttggagttgatccaaaggtcctgatagatgaacttcgaattgtcttttaatggtcctcagaaaagttttattaggtacatggtggacctggggaaacttgttgggacttgtaggttatataattcttttagcttcattgctaggatgcttgggacttttaaccatgacttcattgctcttgaatatgggtttcatgcatctggttgcttggctgttttcagaaagtaggggtaacagtcccatcaatgtatcatcttttccatgattagaaaagaaacctgagaatgctttcctagcaagtatgtagacacagtttcctccaacacctgttctttcaagtcatgagacatttgaaaataaccacacaagttcctgcatctgagcctgtcttttgaatatctgtttgagcaacatgaagttttgctagtgtgagctaatgtcagcatgcaccctcctccccactgcctgtggattcaagtatggcaaatgcctgttgatttggaatgaccaggagatggcttattttggttctgtatcattaatcaacagatgtgtaaacagatttttaaaagtaaaatgcctaatgtcacattgctattacattaaggagctaggattctgactcccttttctaaacattgatccacactgtgatgctttggaaaatttaaaaattatgcaacaatgcactctcattgtgaaaaaaatgagaaaacatagatggaaaaaaagaaatgaacctcaaaaattccactattcagcgataaccactgttaacattttcaggcacttcttttcagttttttttctacaaaatgtaattgcaaatgcattttcaaagatactgctttacaatttcctttttccctttaataatattttgggttttgttcatgttcttctaaatcagaacatagatctgcattatcattttaaaaacttgcattgttttccattccaggatgctagtactatttattaaatatttcattatttttttctcctcctgagcttgactactgtattagtctgttctcttgttgctaataaagacatactcgagactgggtaatttataaaggaaagaggtttaattgactcacggttccacacaactggggaagcctcacaatcatggtggaaggcaaggaggagcaagcaggcaagagagagcttatgtggatggcagcaggcaagagaaagcttgtgcaggggaactcctcttcataaaaccatcagatctcctgtgacttattcactatcaggagaacagcacaggaaagacctgccctcatgattcaattacctcccacttggtccctcccatgacacgtgggaattatgggagctacaattcaagatgaaatttgggtggggacacagccaaaccatatcaactaccaattgattaaccaaatccctcagttttagaacatttgttgaatgttaataatatttcaagtttgcgctatgcactttacatatgttatttcatttaggtaacttgcttacaatttcttgatattactgactatccttattctctgtatacctttctgtaggattgtacactgattatttaagggcttttcataaatattgccagagtatgctccagaaaggttctaacaatttacattcacaaagcacaaagcatccagagtgtttaattctctacatccacacaatcaatgggtattatcaacttttaaaatcttttctaatcttctaaggaaaaacggtaactcattctttcaccttggaattctttgatcactagagaagcagaattttgtctcttgatgtattcatatttttctctaaaatattttaaatcctatatatttgaacatattaaaaagtatattttggccagatgtggtggctcatgcctgtcatcccagcactttgggaggccgaagtgggcagatcacgaggtcaggagatcaagaccatcctggctaacacggtgaaaccctgtctctactaaaaatacaaaaaattagccaggtgtggtggcgggtgcctgtagtcccagctactcgggaggctgaggcaggagaatggtgtgaactcaggaggcagtgcttgcagtgagccaagatcgtgccactgcactccagcctgggcgacagagcaagactccgtctcaaaaaaaaaaaaaagtatattttaattatatgtactcacatgtacataatttcatcaatgcatgcctttaaaatcatgaagttctctttttattgcaattttttttgtttgctttatcctcttcttctttccttttacatcatcctttctgtcccttaaacagcctttaaaacaacattgaatgcatctttccatatttttatatgtccttatataatccttatataatgtatgacatacatgcatacacatacactatattatatacacatgtatgtgtgtatatatatatatatatatatacagtttgttttatagatttttttaaaaagtgggatcatatattacatatttttctgcatcctgcttttctcactcaacagtacctcatttgaaaaccctccaagttgtttgatggagttacaatttatcattttcagtgactgaaattttttaaaggcatgctcctattgataggcattgcttgtgtttctggtttttctttttcttctaccactactaacaatgctacagttaatatcttttaacatatgtctttacaaagaaattgattttatggaacacacaggaatgttattggtaagtggcctaagtgtggatacgtgttttacccctaagaaatgatgccagattgctttgcccgaaggtccaaacacgtcccttcccaggagcaatctcagagagtacccatttcattatgtccagccagcaatagctgttatggcatttcaaattatcagtctgatggctgtagtgataatcatattgttactgtaatttgcatatccatggttactgcttgtgaatttgtatatcttttcatttgtttgtttgccattgatttacccatctgtgaattgtctttgcccattattttattgggttacatttttcttatgtatttctaagagatttttgcatactataaataaacttttattttgttttattttatttttgagatggagtttcgctcttgttgcccaggctggagtacaatggcgtgatcttggctcactgcaacctctgcctcctgggttcaagtgattctcctgcctcaacctcccgagtagctgggattacaggtgcccaccaccacacctggccaatttttgtaagtttagtagagatggggtttcaccatgttcaccatgttggccaggctggtcttgaactcctgacctcaggtgattcgcccacctcagcctcccaaagtgctgggattacaggtgtgagccaccatgcctggctgaaaaactgctaatttttaaaaatatttattttgaattcagaaattagaacaaattttaaaattaattttacaattttttactaaaatttttgatttttttttctgtgcatgcaggtatacaatcatgtaaccaccaaaaagagtttttttctcatctttcccaatacttgtgccagttgttttcatgttatgtatactataatacctataatagtgttgaaataatgtgaaacataatctttatctagctatgattttaaaatttgccgctagcttttaggaaatttctttgttgaatttaagtggtttctttctagccctattttagttaggactggctactgaatttcgtcaaatgccttttaagtatttattgataggacatgtgttttatcttttacttttttgctgcacttaattcaatggatatattaatttcctgatgttaaccaaccgattattcctgaaagagactcaacttagtcttttgatatattgagagattctctttgctaatacttatttagaatttttgcttttatagttataagtcagatttatttccagtttcctattttgcttccatttttattgagtttggacactggattttaaaattctgttccaatggtctatgtagctgttttaataccagtatcatactactttggttactatggttttgtaatatattttgaaatcagaaagtattgatgtttccagctttgttcttcttgatcaagattactttggttatatagggtccttggataaagaaaatgtggcacatacacaacacagaatactatgcagccataaaaaaggatgagttcatgtcctttgcagggacatggatgaagctggaaaccatcattctcagcaaactatcacaagaacagaaaaccaaacactgtatgttctcactcataagtgggagttgaacaatgagaacacatggacacagggaggagaacatcacacaccagggcctgtttgggggtcgggggctaggggagggagaacattaggagaaacacgtaatgtcggtgatgggttgatgggtgcagcaaaccaccatagcacatgtatacctatgtaacaaaactgcacattctgcacatgtaccccagaacttaaagtataataataaaaacaaatagtatatgtaatagggtcttttgtgattttaggatttttttttttttttttctgtaaagaatgccatgcattgaatttgtggatcaccttggacatttttacaacataaattcttccaacccatgaacaagggttgtctttccattggtctgtgtctttaattttatgcattaaatttttacagttttcagtgtacaaatcttaacctctttggttatgtttattcctaagtattttttttattttgctattgtaaatgggattgttttcttaatttcctttttgaatagttcatcgttagtgtatagaaatatcatctattttttgtgtgttgtttttgaatcctgcaactttactgaatttgtttatcagttctttctgtggagtctttaggatttactttatataagatcatataatctgcaaacataggcaattgtacttatttctttctgatttggctgcccattactttttttttttttttttgtctagttgctctggctatatcaaataaaagtgtcaagagtgagcatccttgccttgtgctgaatcacaaaggaatacctttcagtttttctccattgattatgatagcagtgggcttttcacagtgggctttactgtgttgaggtaagttccttctgtacctattttgttgagttttcattacgaatgatgttgatttggtcaaatgctttttctgcatctgttgaaatggtcatgtggtttttatctttcattctgttaatatgatgtaacaccttgattgatttgcatatattaaaccagccttgcatcccaggaataaattccagttgttcatggtgtataatctttttgatgtgttgttgaaaacagtttgctaatattttattaaaatttttgcatccatcagagatatcagccttagttttcttttcttatggtatatttgattagctttggtattaaggtgatgctggccttgtaaaatgtgtttggaagtattccctctagttacattttttggaaaagtttaagaaggaatggtattaattcttctttgaatgtttggtagaactcagctgtgaggccatctggtcctgagcttttctttgctgggaggttttaagttactgcttcaatctctttatctgttatgggtttgttcaggctttttctttctccctgattcaatgtttgtggtttgtattttcctaagaatttatccatttcctctaggttatccaatttgttcatatgtaattgtttataatagtcccttatgatccttttaatttcttaggtatctgttgtaatgtctccaccttaatttctgattttatttatttaattcttctttcttttttatagttagtctggctaagggtttgtcaattttatcttttcaaaaaatcaactcttgttgattttctctatgatttttctattctctatttgatttatttctgctctaatctttattgtttccttctgtctgctaattttgatattgccattatatatcaatttggggagaacaattttgagtcttccaaactagtttggtatatatctctaattgtgtaaatattctttaatttttctcagtaatattttatatttttctgtttatagatcttgcaatcttttgtttaatttatccctaagaatatctttatgcaattacaaatattttaacattttaacttccaaatgttcattgcttgtgtatgaaataaaaatggactttttgcaaattaatttttatcctacaatcttaagtttatttattagttctagtagctttttttgtagatctgctggattttctacatagatgatcatgtcatcagtgaataacaataggtttacttctcactttcaaatctggatgtctttttggagagagttagtatagaattgattttatattttcttaaatgttggtagaattggccagtaaaagcatctgggccagaagttttctttggaaaggtttttatctataaattcaccttttgatatagatataggactaatgaggttacctatttttttcttgagtgagctttgataatttgtatatttcaagaaatttgtccattttttccttatgttgttgaaattattgacataaaattgctcatagtattcccttattatcattttaataactgtcacatttgtagcgatgttatttttcttgttcccaatattgttaatttgttaaagtgtgatttctataaatggcatgtcattaggttgtgttctttaatccagcctgacaatctctgctttttaattaggatgtttagaccatttacttttaatgttattactgatatgtttaggtttctttaaaattattttatatttttagagacagggtctttctccattgaccaggctggagtgcagtgaaatgataatagctcactgcagcctcgaactcctgggctcaagcagtcttcccatctcagcctccctaatagctggaattacaggcatgaaccaccatgcccagctatgtttttaaaaaaattttgtagagatggggccttgctatgttgaccaggttggtctcaaactcctagccaagagtgatcctcccaccttggcctcctgaagtgctgggattacagatgtaagcatggtgactggcagatatggtaagatttatatctatgtttctatttgtttatctgttttttattctacctttccttgttttaattattaagatatttttgggcactgaaagtcttattcatgtaaaatcagaacttcaattttatatcgaatccaaaatttcttccctgaccatgtgcagatgatcagtggctcaaggaccctttccttttcctagatcttttatttttcttcccccactatttccagtgctcaggcttctccagggtttggattgggagaagcttgatcagagtgaagaaggccatgactctttttattcaacagtagcaagagcaacccaaatctttgtttttacattatttatggcagtttcaagtgtttcgctgattgaaagctttagctattaaaaagaagaccctggtattagtctctttacaactgttgcaagcctgttgaatttgaatgctaagagacaatgtgtgttagagcttggtgtacagttgcttaccttaaatagattaggcattagtaatttaattcttcactgagttttaccattctgaactaagatacaatgttgttaaggtaatgagggctatagtaacacagcaagaaaaaaaatcttaataaaagtttttatttttatttttttggagacagggccttgctgtgtcacccagactggagtgcagtggtactatcttggctcactgcaacctctgtcttccaggctcaggcaatcctcccacctcagcctcctgagtagctgggactataggcacatgccactatgcccagctaatttttgtattttttatagagacagggttttgccatattgcccaggttggtctcaaactcctgggctcaagctatctgcccacctcagcctcccaaagggctggaattataagcatgagccaccatgcctagccaataaaattatgttaacatctatgtaatgtccaatattggttctctttcaatggcaattatcttccaagtagtcatttatggctccttattgggcttcttccatctctggctctgccatttttgacctagggcttctaaggttgccacacccatctacatcaagctgacattgttccagaaattttttataggctaagtcctggggatggtatacatcacttctgttcatatttcattggctggacttcagttatggctgacttcaagggaggctgggaaactggggcaagaatagaaaatgcttggtgaacagctagctagtttctgtgtaggagtgttttttgttataaggattttacagatttaaatttaaatttaaaagtccatgaacatggtttttcatctctgtcttctgtggtagtatgttgacatcatatggccaggtcactcaccaccccctccccccaccatccccaaggaaactcagtctcaataaggacatttcttggggagggggaaggtagctcatcacactaacaccaaagctctcagaagttgcaaagcttgaatttttaagaaaatgtaaagggactacagctttataatgagcattttaaacagaaaagaacagatttaatagaacttttattaaagtcaagcagcgatatcttcatacttcatgctgagaatttttttctttttctttaactcttgaatgtctttttaatgatttttaacaatttaaatgtagaaacttatgttctattttctagagttttgattttagacaaaaaggcatttgtataaagaatcctttagagtgtttatacagagctctatgtttagtatttttcttacaaatctcaatcccctggagtcatggggcactcagagcccagggactcaagttcaccattagtttaatggttttgacctctgctctaaagtggatttgtacagagagtcatgccttgcatgtcccagagtcattagcttggcatgaaatggttctactgcttatgttgcagtataattgtttctgagttgggcttctgtaaaatgattatgtctactcgaagacctgaagaatttaagagcaatctgctcatggggtgtcagtatttgagggctggcaactggataatcttatgtgtaagatagaacctaactttctctactcatttagttacctagggtactggctcacttaaagatttgagaggcatctcttttcaagattagtatttcccaccatggctatggaaacagttctctatgtcggccaagccagctctgagcaatcttctgggaacttaatattgtttattattgaatattttgttcattaatttggggtcctaagtatgtctcagctttttgatataatgtctccaatagtgatatttattttaactcatatgctagaagccaaagcttcattaatttgacaatgatttgctacatggttaacaggccaggtgtctagaataaaaaatctgcatcaaataacttttgaatgacaaggtgaccatattctggccaaagggaagacttaaattgaataaataaatgttgtagtatattagaaagtggtaaatgccatgaaggaaataaatgggagtaggaagtttaagggttggtagatattgcaatattaaatatggtagtcagggaggatgttattgattatgtgacatttgaacaaaaacttaaaggagctgaggaaagagcattccaggcagagatgagagcaaggatgaggccttttaaactgacttatttgaggaacagcaaagaggccaacttgtgttactagtgatagagaatgaggagatcctgataggagatgcggccagagaagctgagttctggggtgggaatagggtgaggggagcagaagagagtaagtcctgactaggagcaacacctgaattttgtggcatcctggaggccaggcagagaaaatgtgtggaggagggagtgatggactatgccaaaagatgctggtgggtcacacgaggtgcagtctgagaactgaccactgggtttagatttgcattgagtaagtgtagtgggatcaagagtgaatgggaggagagaaagtaaagattatttttttaagagaagttttgctgcagtaaggtggtacaaatcagaagcaaagttgagagagctcttttacttttaagaagggagaaatcatgtgatgtttgtatgctgatgagaataatccaggggagagggaaaaattgatacaggagtgagaggagagaattgatgaaggttagagaggagggatctgatgcatgagaagagagattggccttaaatacaagcacggccagtgtatccatgaggagggcaaatcaatgggcatggacgctggtagatgggtaagtatagagatgggaccatgtggactcttctaattgctggtaggtgggtaaatatagagataggggcatgtggactcttctaaagctttcttagcacaacaaggaataagagcatcatctgggagcaggaatgagagaggactttgaggagagaggagaagtaattgtgagagaagggaaatgaatggggcaaggggtgttattgtgattgctcagcagcattttggtggtcatgtctacgaaggacttaaagacaggtaagaattgaggtgtgagaggtaaccaggggtcagatgtactagagccttttgggctgtggtcatgactttggatttcattctgagtgagatgggcagctgttggagaatttgagcagtggagtgacactatctgacttaggttctaaaaggatcactttgaccactctgtgcagaatattttgcaggagcagaagcaggaccaaaactagttcagcagtctaagagaaagatgatggtggctccagctaaggtgcaagtggtgaaggggagaaaaagagctggatttgagataaattttgaaggcagagctgacaggaattgtcaattaaaagaagagtgtgagaaagaggcattaaggatgagtttaagatctaatcttgagcaatgcataaatactagtgctaattagatatcagatttctcagtccccaatacacctataagatcagcacaaactgagctggcattcttagccatgtagcaaaatgatccccatgtagactgaggcagtagtctccttcaggttaatgttgctaatagcctcatatttcagacacaaaggaagcaggttttggcatgaacatggtatgcaggaggtttaagatgtgtagtttttcaaagtattttagcatattttcttttaattttataattccaagatatattaagtagataccaatttaacctaccttctggaaatttcttctttcaaaaaatgacagaatttagttaatagtctggcactcgttagagttttcccaacaataaaacaaagtgtatttattttaatgggaagttctgctctgtccattcagtattttaatgttttcactttttccttctttaaaacttaaaactataaaagtctgaaaaatgaatatgccatcaactttaaaaataaagatgacactttgctccttccttcttaaagaacagcttgtctcaattttcccaatctctgttttcttgaaattttactttctgactgggccaatctggctacatatcctcttgctacttcattctcttttatcagcaaactttcaggatcactaaagaataagtagtgtctttgcttccatccccttacacttagagactttcagagtttctgtaatagctcgctacacagagaaaggcaaacaaaaggatgctagaacattttcccaaaaagtgcagtttagttcttttcttcattgtgtttgcaaatgattgcactgggactgagggaggaaatgaatgtattgcataggaatctttgttctgtggtttggggagatcaagaccaatactacctggatattttattaacatcttcaatttgtttctttgagtcttcttccctctcagcagaatgaatgattaatttcaggtaaaaagaagcaaggtttttattgcctttccccataatctgactttcagagtggacttgatggctccaattattggtgctttaaattgtaaacagttgtcaggtttgtggataggtggatcaggaacagccacttgttatttcagagataaaggcaatgtagtgcaaaagctgagagcttgggatctggagtctgatagattctagtgtcacggctctctagctggctaggccacttacaatttctctggggctcaatttactcatctggaaaatagggatgataatgtttattttgtagagttgttaagattgaaataagtaatgtatcttaagcaattaccacagtgccctgcacataataaacactcaataattggtagctatttttactttttattttataaatttgtaatataaggagtatgattttaataattgcattattacatattatatgtattggtgtatatatgtcttattatattacatatacatatatacgtgtgtgtatatatatttatatatgattcagatttaaaaaaatagtgttttactttctctaagcacccccaaaggattacaccagtgattctcaaaatacagtctccagaccaatggcatcagcatcacctggaaacttattagaaattcaactcttgtaaccccatttcagaccaactgaattagaaactttaggggtggggtttcataatctgcattttaatgagtctttctagtaaccctgatgcactgtgaagcttgagaaacactagaagaggctatgttctcatcccagaataatgactttcaaactaaaacatccttgtggttaggtggctcatgcctataatcccaacactttgggaggccacggtagggggatcacttgaggccaggagttcaagacccagttgggtaatatagcaagatcctgtttctacaaaaaattttaaaaattagagaagcatggtggctcatgcctgtagacccaactacttgggagtatgaggcgggagcatcactgaacaccaggagttgaaggctgcagtgagttatgattgagccactgtacttgagcctgggggtgacagggcaagacccattcttgctttagttactgtcttgtttcatgtagtaaattctaagcgacctgtaaatgctgaagtgaaatcaaatggtaatattaaaaacacaaactctttgtttaataaatgtctactgagtgcttactaggtgcaaggcattgtgttaagatgctttaatgcacacctagtatcattgtgtttggcacagtggctctccattcttttctgtttgcttgtcaatctttctgtacactgctttacttactactgccttatagtagctttggtatgtgatggaacaagttccttttctttaatctccttgtccacttttgatcatttattcatctgaataaaattcagattaagcctgttaattttcatgacaagctataatattcactgggaatgttttgtagatcagtttagggaaaatacaaatttgtagatcagtttagggaaaaattgatatcttcatgatattttcatgatattttaagccttctggtaaatgaatgtgatgtatctttccatttacttgagtattcctttacatttttcattaaaggtatataatttcatactttcaagtaatatactactttagatttattcccaagaaccttacagatttaaaaaattccatttattattgaatagatattttaatttgtcattcactttctaattgtttgtttcttgtgtatggaaatgtcatcgatctattttttattaattgatcctgtactctgcaattttacagaattctcttattagttctaaaagtttgtaattttcaaaatattttctgtggacaataagttctacaattaatgacagttttgaatcgctctttatttttctcttattgttatttcttgtcttattgagttgggaaagacctccagttagaagttgaacagttttgtaaataacaggtgtcttcattgtgtttctgactttaaagcagatgcttccatcattgatagcaaagtaggaggtttactttatatatatatacttttcctagttaaaagaagtttctttactcttcctagttggttaaaactctgtattataagaggatgttgagctttttatcacataatatggtattatttgagattttttctgtataaatacagtatttacatttataggttttacatctattaaattatccttacactcctgtttaaaacttgcttgactgctaatattatatgtaagattttaccatctatgcttatacaagtgattgagcttataatttcactttctgttgctgttttttgttcagttttgatattaaaattttgctggcctcatgaaaggaagtagagaactttcctatcttttggtctctgcaatagtttgaaaaagaaaaaggctatttaattcttaaagttctggtaaaatatgcctataagcctgtctggtcttcatgctttggtgcttctttatgggcaaggtgatttttttgtctgtttctttctttcttaaattactgagttactttccctttaggttttctacttcttcttgagttagttttgggaaattgtaatatttttccaggaaactttccatgatctttaagttcttacatatttactggcaagtttgttaatggtattctcttacagtttgccaaatatttactgctacaatgtgaatgtttgtgtccaaaactcctatgttgaaaccaaatccacagtgctatagaataagaagtggggcctttaggaggtgattaggtcactagggcagaatcctcctgaatggaattagtgctcttataaaagagatggaagggagcttcttagcccttctaccatatgagggcacagcaagaagatgccatatgtaaagcagaaagcagtctttaccagacactaaatctgcaggcaccttgatgctggacttcccagtctccagaactgtaagcaacaaatttttgtttataaattgcccagtttatggtattttgtcacagcagcctgaatagactaaaacatttactatatctatacttagtctctcttcatttctaatattgtttattttgcacacacactctctctttcttctactctcttttaccaaagacttatctattcaaagaaagagcaattttgttgatactgtcttttctttctcttctgtttaattaatttcctcttttaccacattttattccttttccctcctctgagtttctttctttcttttttttttttttttttttgagacagggtctcattctatcacccaggctggagtgcagtggtgcaattacagctcactgcagccttgacctccttgggctcagatgatcctcccacctcagcctccagagtaactgggattacaggtgtgcatcaccgtgccttgctaatttttgtatgttttgtagagatgagcttttgccatgttgcccaggctggtctcaaactccaggggttaagtgatctgcccaccttggcttcccaaagtgctgggattacaggtgttagccaacacacacagctcttactctgtagtttttaaaataatgttttgagttaaatgtagtaattaataatttacaaatttctgttcctaatctgatattaagtctataccttttcctgtttagctgcatatgaatacaaatgcttccattgtttaattataaatattttatatttcttattacaattcttctttgacccttgaattatctagaagtattttttagtttttaaatatacgaattaaaaattttaattgattccttattttcttggagactgtggtctatatgatgtcatttgtttggcatttgttgagaccactttaatttacttcaaagatattttaaaaattgttttgtgtgtagttaaaatgaatgacattctgtatgtgatacacgttcttatattgagcttgtttattctattgtttgaatcttttatatctttacttatttcctcctcacttgttttgggaacattaaaatctttcactatagttgtaatgtgtcaggttctctttataactcatcaatttatgatttatatattttcaagttatcttcttaaaagaatataaccaagtgtatatagggatgggtataacagtagatcataaggatttgagggatgtcaaataccagagataaagacaaagaagagctggagaagaaaggcttttttgcaaactctaagctgaaagtggagacaaaagaagtgccaggtatgtctgccaactccgtggcagacagactcacaccgcgggctgtatgctggataaggaacgaatgcagaagacggggtccaagatgaagtcagctggatgtaactcacagctgactgctttgaattgctgccatacctgtgtgtttgtttgaaagtggctagacttgaggttgctacctgacacttagtcctggcaggaaagaattcttttttgtggactaaaacatatcagagcaacttctaacatttaattaatctccacccacacttttattttggaaggatgtttctgactcttgtatacttctttttccaatctaagaatcacatttcatattgccccttttgctttatggaggcatgaattattccaattgtcttacttaactggcttttattgtctggaggaaactttagtgagttcaatttacctggtagcctattttgtttctggtagacttcaacactgagcagaaatactcctattacagcacttagtttatctgtagatgaaaacctttgcgttttaaataaaacactcagctagaggggtcaggtttggctctgtttctcttcataggtgcttctaaaaacatttgccaagtctgaagtcctggacttagacatcttggaggaacactaagggtagagatgcttttcattgaatgtgaaaaatagcatttttgctgaagactattttgttcagttgctgcaaagtaatttatcttggggagcagagaccaagtctgagagtcggagacattcaagaccaaaaggaagctagagccttttttttttttttaaaaaaaaaaagaccgtatatttataagcaatcaacaaaagagagtttttgatgaaaattattctttaaccctgacagtgacattttcttcagtaaaagacgcagctgtctcataaacataaaaaatatataaaccctcttcattctttcattactttcaggtctcttgattttgggtgaagaaagtaagcaaagtttatggtgaggtttttagtaaattactcagatgattcaagattctaaccttccccagctccatgcaaacatttatctcttttatttagtttatgcaaattaaagggacccctggggatgtgtgctgaatactctatataattgcacagttttaaatttcagtttcctagtatagatctggtatctaagatggtgtgacatttttagtttccaaaaaccttacaacagggttcacaaattctgaagttgagtcttagtgttttcctcttgggtcattttacacaattaaattatactgcttcaagttctgcatgataattcccacaccagatctcttccatgaatatccactcctttttcacattcaaaaatgtagaatcaaaatagccaaattaagcagcagataatctgaaaattaattgtttcaggggaggaaagaacaagagtccgattagcattcatttgaaagaaaacactttattgaggtataattgacatgtgaaaagcttgtagtcctagcactctgggaggccgaggtgggaagatcacttgaggccaggagtttaagaccagcctgggcaacatagcgaggccccatctcaaataataaaaattttttaaaaagctgtatatatttaatgtgtacaattcgataagcctgggcataagtatacactcatgaaatcatcctcaccatcatggccatggacatattcatcacctcccaaagtcttctcctgtccctttatgtttatcatcattatcttttggtaagaatgcctaacataggatctagcctcttagaaagttttaagtatatgatacagcattgttagccataggtactatgttgtatagtaatctccaaacttattgcataactgaaattttgtacgctctgaccatcccttccccatttccccccactctctggctcttggcaaccactactttactctctgcttctgtaagtttgaatatttcacattccacataaaagtgagatcatacagtatttgtctgtgtttggctatgtcatttatcataatgtcctttaggtctatccatgttgtcccaagggcagaattacctttttttttttttttttttttttttttttaggctgaataccattccattatatgtatatatcacattttctttatccactcatttgtcagtagatatttaggttgattccatattttggctattgtgactaatgctgcaatgagaatgagagtgctaatagctcttcaagattctgatttcaattcctttggataaatatccagaagtgggattgctggatcatatagtagttctatttttcattttttgaagaacctccatatgaagcaggatatttccctgacccgtttgtgggactcagaaagggagtgccttgtctactcagcctgcccgctttcagctcctcaaggaagggagcatgcaagcaaatgaggagggaactggagtgcacaagtgctggaactggctgaccgtttcggtactggcgggaacaagctccactcactgggatcagctgcaatccacccctcgcagggctggattcttctctgaagttacaccgtcaagctgtccctctgaagtcaagctacttctctctgatgtccagctgcagtcgttccattgtccagctgcttctctctgctggctgagtctggggtctttataagcataggatggggtcgggtggggccatgggtggtttaggaaaaggcaacattcaagcaggaaaacagggacgtacattctcactttaggctgcgggtttcaggctttttgctcttggcccagtcctttaaaaaactttttgcactttggtttcctcatctataagatggacagaaacacccacttcataggtttgctgtagttattaagaggataataactatagaagtggagaatggtaggtggcagctattactgaattaacgagtcagatgttttgctatgagaaggtcctgttttttttttaacatgctatagactttcaataaatgaaaatttttattatttcctaagaaatgcacactgatagtaaaaaaaatgtaggaactcaaacaaataaaacacctttaattctataactgagagagaacttaactgagatttttgtctattctctatatttttctatgtatacacatattatttaaaatggaatgctgtacattgttgttctgtaagtgcctttttattcagtaatgtttacattttctattttgccatagtgttgctattatgcttgcaaatggatgcttatgcccacagatgcttgaaaccattagaaataaaccaggtccttggcatagggttttgaatgactcaaggatttgctgttgtatagatgataatttgctgtttctttgtggataaggcttattcttcttatgttacacagagtggaataaggacaatgatgcaaaaaagagccattctcggagggagtcagtcaggggcaagctcagcgtgtcaggagacaccagggaggcccaggtgggaacctctcatgcttgcactgcgaaggggagccaatgccaaatggagtcctggggccaggacagaagtgaaccctagacttgtgagagctgaatatacaaatggatgacggctggaccccacataaaaatagaactctgacccacagcctgcagcaacctgcctaaaaaaccaatcctcttatctacaatgaaaagcccaggtagccagcctgctagaagtcagacttgcaggaaaccagattgttatctttagtcatgatccaagaagctaaacaataacttctataacaatcagccccgaatggccaggatgtgattaataattggcagcttccctaatttttatcctgacttccaacttggaccaatcagagaaagctaactatgccccctaaccaatcccatagaatgccaggcttctggttagctcacctacagcttcctcaggcacagccccaggtatggcctgattggagcctgtcagcataaggaagtgggaatggactctcccttttttccactctaaatctttctcactctcctgccctcttttgagtctctgccaaaatgtaaatgatggcagctgactcccttgttatggcaagctctgaataaacagcctttgcttttctcatctggttggtcttaatttatgtccatacttgcttgaagcccaggtagaatggctcatgtgtagccattgtcagacagggccctttgtttttaatggaacttgacttggtctctttgtgaggtgcaggcactggacggcaaggatcataacttactcatctcagtaatctaagtgtccagcacttgccttgctcataataaagattgttgaaataagctggaaagaagtcttatgcacaaagtttaggccttttcttgtccaatatggaaccaggaaagcccaatgtgactagtgtgtcttgtttcaatagaaggaaatgtcaccacgaattccagtgtaaatgcaaaacaaactggaattgacttgggggtaggggagcttagcagtctgcatttcgctaactctctagagaacccctttaaaatctttttggcaaaactttccctttttttgtttaacacctccctctaatctaaacccatgtggattttgagggaaatttaattaaaaatgatttttttcttttgctaaatagaagcaggtactattcagacagtgaaggaaatcatgactgggttgtttttgcttgtttgtcatcctgtttcccaggaagataatggaaatgatatgtggccagttaatcatcagtgaggtggagtttccatgaggcttctgcagggttgtaactacaccagaaccttcaccagaagccccactcctcaattacgggctatttcagttctaggttcctcactgcggaacagaaatatctgcccagagttagcattaggacctagcaaactacacctggtccatagattgccctgacctagtgtgttctttcagaggattgtccacattcaaacactgaagcaattttattttgtagctaagacttcttaatgtgtgggaacaaagttcaaaggtgggtagctctggaggaattcgttctcagaactcccatgcagattgcagagctgtaatggtattatttattgtgccaagcatcttttcagaacctgccactagactgtaagctccacaagggcagggactgtgctgttttatttatttctgtgtttcctgcacccggcatagagtagcacaatagaattttgttcaggttgggcgcagtggctcatgcctataatctcaacactttgggaggctgaggctggaggatcttgagcccaggagttcaagaccagcctgggcaacatagtgagaccatgtctctacaaaaacaaaaaaaaagtaattgagtgcagtggtgcatgcctgtagttacagctacttgggaggctgaggtgaaaggatcacttgagcccgggtgttcaagcttgcagttagctatgatcataccattgtactccagcctgggcaacagagcaaaacctcatcgcaaaaaaaaaaaaaaaaaaaaaaaaaagagttttgttcaatgtgtggtgggaacttggaattcagagtcacatgatggaaggtacaaacacagcattatagtaatgagactgaaagcaagactgtattgtgaaatacataaaaacatcaatactacagcaactgtccttgcagggagaaagctattttgactaggtatttattaacaaatagatgattttctactatcctctctaatagagcccttgatgagccaggaagtcctgcccaatgagtaatctgattgtctcattggaagagaagttaccctatattggcttgtgaatagggcatatagtaaagccacataatgaactcagacccccagtgggaggaaaatgatcccatgtcccctgatggatggaaggggaagaataatgctttttcttaaattttgctgcctgattactatacaggggaagttcactcaacttggttgtaacctaccctcctgagaagcctaatgtacacagctccaccaactatgtgccatctatttgtacaaccaaacccttgctatatttgtcaccttagttttcccatatgccttccaggtgtcttggtgggtggtggggagaagggattacaaagatgtgtcttttagtcaagaacttatgtgatgggcatgaggggttgtcattcaacatccatttcaaccttcttctgctgggcctttctataatgcagaggtttaaaagctaaaaactggatttcccggagtcctctgcagtcagagttgtggatgtggtttagatgcattcttatttggaaggcaaagggaagcagaggcattgcttcccgtattgtgctgtggttgcattgctatgaagaaatacctgagactgggtaatttataaagaaaagaggtttaattgactcactgcaataaagttctgcaaactttataggaggcatggtgctttcatctgctcagcttctggggaggcctcagggatcttacaatcatagcagaaggcaaagctggagcaggcatgtcacatggtgaagcagcagcaagccaagggagtggggaagatgccacacacttttaagtggtcagaactgtgaactcagagcgagtgctcacttatcaccgggaggatggcccaagccattcatgagggatctgcccccatgttgcaaacacctctcactaggccccacctccaacatcggtggttagaattccacatgagatttgggtgggaacaaatattcaaactgcatcacttcccctggcaaggatggttgaggaagcatgtggtttctctgtagcagtattagcaaaggccccactgcctggccattagccatgtgtgtggactgggaatggatgtgggaaggcagggagcagggcacccttgttgctggcacagatcatctcacaactggtggagtcctggagccggcagccacaatcggggcttgcccaagcctattatcatggcagtgggtgtgtttgtagctcagcttcccaatcagcaggcagcaactttggaggcctggttctgttgtgtgacttgtaagttgtttccagaagaacctagagtttgtttctttagccctcccaatgttctataagccatttagtatattgtaataaatccctttctgcttaagttagccagattgaattcttttctttgcagtaaaaccctgacccccacagcttgccaatgtggggctgaatcaaactttctgagttaggtattagagggtttccctccccagttactattgccttggttttagacaattatttgcaaaactgctgatgtgttacttttgattcctgaattccagctattgtgttttttccactatagtctagtaagtggtaagcaattagaaattcacgattttgcattttattatgtttaataacatgttgaacctgtaacatattaaattctatgttcagaaaactgttgagcctgctaacttatccatcagggcctgggtttaggatggtcttgtctgttgtgttaataagccattgctcctgggtatctcagtgatctccggatgacatgtaatataaaattgacggcaataattgttataataaagcattatatttgtaccctcttttatggtgtttgaaaacatgatctcttatgtcagaggtaagggaaagtgttatagaggagaaaattgagattcagagacatacgataatttgttgaaagtcatgaagttagttaataaatagcagagccagatcagaaaatcttatctttgacaacaagaaaagcaactgaatgatgtaacacatttcttctactaaccagccaacaataggctaagatatttagtggagccagctctccttttaaaaacctctgctgaagaaggttcatcagatggtgcaaaaaaataagcagtgcctttggagttacaaatttctttgcaaaggctggtggtgttgacaggagaggagttgtggggtgaaggcagagaaacaggattcaagctgaagcgattccttgcaacatctgttagtgctgaggcaagcttgggttactgctttattccacaaaacaaggatgtgaaaagcagccctaggaaaagacattaggatgggctgaggcagtggaggaggatggcatagggttacttgtgggaaggagagcagatgacctgctgggccgaacatttcagttaacacttttctgggttattgttcttgctattaaaatctattactaaagagtccttcaaaagaatggttatgggtttgaaacagaaagagaatgaagcactcttttccaccagatatctctttggtccttatagctaagactttcctggacttagttttcccttttttggtacataaggaggtttccttttgctgtggaaggatttacatgtagccaaatgtttcatgggcctatctgtaatgtgctttaaagccttttctgaaagtgaaatttatttaaaggaaaagctgtttcctactagttggaacgacatctagaagtatgattcatgcagctggtcccaagcgcctcgagagtagacttgccacagagcaagcctaaagatgttaacctttataatgccatgatttgtcttctgtggccctgccaccaggaacctaagtatttccagtgccttctgttgttttgcaaagcaactgattgataatagtaactaaggcctgttggagtgctgcaaactatcatcataggagggaaattgatggttggaagagtgaggtggttaaggctccctgttccaggggctggcctcagaaaccaatgactggtccgtgtatggaatcaggtctggaaaggagccgtggccatatcctcacatcataaaaatttggacgggctttgcacacggacagacctgggtttgagtcacttcactagctttttgatactgggcaaattatttaatgtttgtctcagcctagatttcctcatttgtataataaggatgataccatcaaagggctgttgtgaacactagaaaaaattattttaaggcttgaacaataatgcctggcacatggtagatgctcaacaaatggcaaacgactgttgtgattatgctcatgcttgtttgctcgtcattttcttaaccagtgctaagtttttcttgaggggccccttctattcacctcttttcttccctctgtctctatttctgttatgagcatgaagtttacatgcagtgtttctatttctgtatctcaaaacccttgtatgaaaaaaaattatcctcaaaatagccttgcaaaataggcagtcagcagggttagtgtccttatttcagaagtgggaataatgaggctaagagaaaaaaagagttagagaaagactaaataaaatagaagccctaatctggggttatgggctttaaatccctgaaaacgaatgcaaaaaaaatttttggtgcattttgattgcaagaaggtctatagcgttcatcagattctcagaggtctcgggatccctccaaaaaggttaagaagcactgtggataaagaccttctagactagagagctatctgaagggagttcatggtttctgctttcctgtaggcagaatagtagtagtgcactttgctggtgtatcatttccatcagtatcgcctctgggccactttgaaaatgtagatccctaggccccagcccagacctacagaatcagagtgtcaagaactggagctggggtatctggcatttgaacgagttctccaggtgatttttatggccactcaagtttggcagtccactggtgtggcagtaaaagctgcctttggaaacagatcaccaggttaagagcctccccttccacctatgggaacttgagctattacttcagtttcttcacctgcaaaatggggagaataatcatgactccttcataaaacatttgcgaatattaaataaggtactgtctgcccagtgtttaactagtggcttaatatgataaatactcaaatgttagctgaactgataataataattatgagtgttattattatcagtactatcattagagagattggagcaaattgaaggctctgactctctctgggaaattaatgtttgaccatttattaatacttcagccacttttgagagccgtctggctcacctgcaatatctgtcagcatcaatcctaaactgtgaagactgatgagatgaacacattagccatattacagatgatgggcaatttcattttcttttttcttcttagttgtgaatttttctgccatgaacatgtatgaccaaaacaaacacacacacacacacacacgtacacacaaacaaatccacttctagtttttcaaaaaggagtattttactcatgattgactgaaaaataattcagagtttattatctgtgacattgcagtaaattttttagttaacgaatcaggaatttgaccccccatattacattgtttgaaaaaataggcattacttacaagggcttaaaggggctttttcagggagtgaagcacatttcagtagaaagcctgtctgggggagcatgacattattgttgcagaaattagaattctagaggttgttgcctgattttgaaatagttgcctgtctttatgaaagactgaaaaattcatttgagagttttcttctcaaacagcttccaaagtgactgagaaactctcacaaatataagatatatgtgagaatgcatattcagaagggtgaactgtacttttcagatatgttgggcctatttgaaaaaaacaaaaggcagtttaaaaaacctggcatatataatacataattgtttggaataatttcacacacacatgtgtacatacatacatagcatatgtgtaaacattttcaactgtattaaactatagatttaaaatcacacagttcaagtcaagaccagaagccaggccaaaagaaaaacaacaaagtatagctaatgaaacacagtattaataatgcaataataaagagctaatccttgggattagttctggctgctattttttaaaatgagttgccaaggagagggatgagtagcaaagtcatctggtgaccagaaactactcaggaaaaaagatatgcaacaaaggacaaaaaaactcaagaacataggctaatgacgagaagcaacatgaaattcacaagtcccagaaggaatattttaaggaaacacaactgtgaggtggaatttaaagtttgtggtaactgatgaggaaaaataaaagtcaattgacaacagagaaccatctgctgagaaaaggctcggttgctttttcctctttcatcttcttttgaataactcatggtcttcgggttgccctccagcctccttgtccactgtggctcttggctttatgcccttggctagatcttgcggctgcttgaactcattccccaaatcctactttggcactgtgagtttgtgtgtgattgccagacactgttatggctccattccattcctgggacagctcagcaatgtgattgggtagggaaaaaacacctggagggtggcacagaggtgtcagggtggcttgggcccatgagctggtgggtcagtgtgggccagttgcataagaggatagagcccctgcctcttccattcacttcctcatgcagacccaggggttaaaactaccatgggttttttttaacaagcggaaaaatacctgagtgaagtttgtaaccaagctgtgttggtccattctcaacggagaagaaaatggcctaattggaagcccaggttatctgtgttcttcctatctaatgtcaatcaccagaatgcctgctctgcttttacttaagggaatcccctttgtttcatgtgtgtccaaagtcctccgagaccgctccttccaatctctaaaggttagttcagcagctacagccaatcttaacatggtggtccattctctactcttgatttcctttcctgttctgttttctagccccaaaccttcaggaataggactggacagtggcttcattgccgtaatcaggtaaacctagggaaagaaagttgcatctgcatgtcagccttattctcttacgtttccatctctgtgtttctgttctgaatctctgtctcacacacatacacctttatgatttctgtgttgcacatttactctgtctttgctttctcatcactgttatggtcttccttctgtattttacacataatgctcccaactgtcattattttctttgtaatgatagtaattttcattatgggtcctattcctatggtcatcttctttcatttcctcaatcctttttcaactttgctgaaatctgttgataataactccttccaccctagggataataattcccccttacactttatatgaagaataggatgaattcaaaagggagagtgccttcccttctgaatctggtgcctgtgggtgcctttgccttttttaaccctctcgctatggaatgacattccactgttctgggtacccagcaggtgacatagtacctttggtctgaagattgggcttagctgattggtacacattgtcgctaccctgttagttcttgaatgggttacaaacttcattgaaaaaaaaatggaagttgtgtaagaaatattttcaagcatgaattttctgtcgacatactctctttcgtcacggtcaactcaaaagtcttcatgggacatgatgagctgagctggcagcaaaggaaggagtggccaagagctccctgtgtccaggctcctgactcaacatctctggtcatcaagctggctttccaggcatagaaataggcacgagagttttccactgaacttgactaaatcaaatgaggaaatacatgaaggtgttggtttctagcacttaacttttcctgtggctgggctaataggcaaagccagggactatttcaaactggagtttctgcagcccagcagcattgcatgaataaaagtaacagttacaagttggcagtttaattcaggggcaatcaatctaccatctcaagggattgctttggggaagtggaaccaagagtaggaaagaagtttatgggttaagattttggtcttctttcaggtatgctattaatgtgccctgtgactgggtccatgccccagtcctattttcctggctttatggaagatgccacaacatcagctgagctgatataagaatttcctaactcatgtaagatgatttataaccctcagattaataagtagtagcatgtgatcatctcacattgttgtatgctagccatctctgacataatgtactgtcatctatcagctcttagcaattattaacagaatgtgactgtatttattttatgtgtataactcttgttgacattatctgcattgtcttgtgcatattttaactcatatattttctttgaagtacttctccaaaaaattatttgctttgggtatttctctttgattttatctatggtttttcctcttctttccaagtgttcttctttttctcaaatgttccttcactgtctttatcatcctagaattttattttagtcttgggatttattgaacttcttctccaatatttcattagcatctcatccatggtttctcagaattccttcacatggttcagccattttgatacttcttaaaacttttaaacctttgattaaataaatacttgctccaaaacacataaaaattctttgactgggattaaaacaacttttcagaaaggaatacaattcttataaacacgtttatgtgtcatattaagttcaaaatagatgtgttcctacacattatagaaagtctaagtttaattttttaaaggttgagtaaatacacacttgaaaatgcctacaattttttttgcctacaattcttataaacagttcctaactacctgtcaacagtcagtgtcaacatttataagttaacaaaacaacatgctttgacagagtcactaaatccttgtctgtttatttctggaatgatcatgtgaaagtcatgtccagctgaaccttagaaaaacatacaaattttacatagaatagaacacatagaaaatagaggtttcaacagtggatctgtctagagggcgtagggcctttatccatgtgcaaacaggccagttttcacctcttagggccagtcctatgctttagagatagtggtgctaattaaagcatttgttgccagagtatttttactaaacgctgcctatgaatcaactgagaccttgtgtccaccaataataatgataataaaaaatgccagtatttaaaaagcgtggcacagccactgaccaagtgacagctgatgacacaccctaccaccctgaggggggagggatgatggcattatttcacattgactcagaaggcaatggattcttccatgtacctacagggtcaaatgttgtccattggttccaagcccttgtctttctttgacatacatttctgctttgggtaaatctaattctggtaaattgattgcatcagtggccccagttaaaggcctccctatattcttacctttgcagtgtgattttgttgcccctccagttgagaatctgttctttacctttttggatgtggctggcctgtggttcgccttagctaacagaatgcaatggaagtgatgggggtgggggtcatttctaagcctaggccttaaggggccttgggtacatccaccttgtcttttggaaccctaccataagaacaagcctgggctagcctgctggaggatgagagaccacacagaacagaaacaagtcatctcagctgaggccaacccagaccagccagtctctggcctaccagcttactgcagacacataagggagcagtggaatgaagtgtagtagtgaggatgtagtctttggagctagacagacttagaattgagtcctagtgctatcactgcatagtgaaatgatttcaggcaaattcattaacctctctggtttactttcctcatctgtaaaatggggatagtaacaatagccacatcactgggttgttctgagaattcaataagtaagtccatgtaaaatatgtagcacaatgactactattaataaatgatacactctaaaaacatgactaataattaataataatattgcagttgaagtattggcctagctcatggtggggcatacaattaaatgtgttgaaaactgtaaaaaaaaaaaaaaaaaaaagtccctttatactttgttgctctggaaggcagccccagtatctgggtggatattagaaactgatatatttaggaaaaatataagaaagagactcctaatagttagagctctccaatgacagagcaggcagctgagcaaaaataagagaactccttgtctcttgaagttttcaaacagtctggaagaccatctggcagagatattgccgaggagattcctatttgagtaggagttggaagaaataaattctaaggtctcttccagatctaataataaaattatattttatttacttaaaatatttaattggacttttttttttcttccccaaccagcatatttgtagcaagccaaaccacaaggcaaccaaatgacagggtggggtgagtgagagggcttatctctactcctcctaatctcatccttctggagtaacccttgttgacagcttggtttgtgttcttctggacttttctttacacacatacaaactaatgcaaacatacacatgcacaccattgccctccttcctccacggtgtttgctatttttttttaatgatcataagatcatactatatatgctgttcaataacttgatgttttcacttaatgtatcatgggtataactgattttaaggttcacatagacaaaaaagtgtgattgtaattctaagaccattttgaaaattgacttcttagatattaaacttattataaagctaattaatcataatagtatggcatcagcacaaaaaataaatcataatagagagtccaggagtaattacaaattcatatgggaatttgtcattttaaattggtaaggaaataattcctttccttcccatctgtgtagattcttaccatgcatcctatacaaagactattacataaaaataaaacaaatttaaggacttaaatataagacattaaccataatagaaggcaacctaggtcattctttttataaccttgaggtgaacttctaaacaagacaagaaacccagaagccaaggagattgacaaatttgacaatataaaaagaaataaataaagacttttgcttggaaaaagacacagtaaacaaagatgaaaaccaatcacgtaaggagaaaatatttttaatacatgtgacatcaatgacttaatgttcttatatatttttaagaactctacaaactgataagaaaaattaaaaactcatgtccagtttcaaattggacagcggatatcaacaggtagtagaagaggaaatcagacaggcaataaacacatgaaaaggtgcaaacgttaccaattgtgatggaaatgtgaattaaagcagaaataagctatcattttcatggattttatttgccagaatgtaaaagatttataacaagaagtaaaaagactgtggggaaaatagctctcataaattgctcttgggaatgtgaaatgtcctcttttaagaaagtacttatccagcagattaaagtgaaaaatttatcatgttctttgacccattctgccttttaagaatctctcctacatgaaaccagtagggtgtaaaaatatgtattcaaagatgcttattattgcattgtttgaagcagcaaaaagtagaaaaattatcaatgtttataatcagggcatagactgaataaataatgacacattatactgcagaatattagggagctaatttttaaagaaaagatattgatttggtgggacaatccaaatttaattgacatttttaaattataaaagtggcacatagttaatacagaaaatccggatagtaagtactaaaaaacttttaacttatgtttctcagagttagccctgttatgttttcattagctttctagttctgtgtgtatatgtgtatatgtgcacatatacacaatatatatgtgtatatgtgcatatatacacaatatatgtatttatatagttatatttattcatacttatatttgaatttttaaacaacataaaatggtaagcattttcttccattaaatgtacaaatttaaatagctgactaatggtctatgccaaggctgtagcataatttgtttttgtcagtggaaatcgaggtggtttactggttttggtgtttaaagtaatgcaatggatcactcatgcattgctggtgggaatgtaaaatggtatagctgctctggaaaacattttggtagcttcttaagaaaactaaatatgcactgccatacaatccagcaattgagctcttgggcatcctctgagagaaagaaaaactcatacttacacaaaaacatatacatgaatgttcacaacagctttatatgtaataaccccaaattggaagcaacctagatgcccttcaatgggtgaatgattaaactgtggtacatggcataccagggactattattcagcaataaaaaggaacgaactattgatacacacaacaacttggatggatcctcagggaattatatggagtataaaaagccaatctaaaagattgcatactgtatgagtccatgtacataacattcttgaaatgacaacattattgaaatgaagaccagattagtgattgccagggattactcagggagtgggggcaggaagggagtgggagtggctataaaagggcaccacgggggagcctatgatgatgggaatattctgcatcttgactgtatcaatgtcagtatcctgggtatatattgtatcgtagttttgtaagttatttccattagggaataatttgggaaagagtccataggatctctttgtattatttcatacaactgcatgtgaatctacaattatctgaaaatgagaagttaaaataaaaaccattaatgcaatgaacatttctatacacgtgaacatctgttttcctaggctgtattcctagaggtgacatttctgctggatattgtattaacactattgagacttttgaagcacattgtcaaaatgctttttaggaaggttcgtacagctcatacaagtctacgttttcgcataatgtaggcagttgctgcagtttttctaacattatagagttcttgcctttggagaagcactgttcaaagcactttacctctcatttaatctccccaaaaggcccatgatctagggtgttgctgctgtcactttaccgatgaggaaactgacactcagagaggctgaggagcccagctgaggtggcatgctagttagtggcacgattgagactcatactaggttcgtttaatgtcaaatccaatgtgctaaccactgtgctaccctatgcacttaattattagactacttgttagttgctaggtatgcaatctaaggattaagaggatactgtaaagagataggaaaaaattactgtttgaataatactggaaccttggaagacctatggtcttggtttgatacttctggaagcattattaactcaaatcagtctttccgttggtcctctcgctcttagggcctaagtcttcatactgttttctcccccaagaagttttcagcttgcttttaaaggatagcggtagggatggttgtctgttgctggtgcatttctcataaagacttagtcttaactttttaatctttgtgtctgtgacacatgtagttatgttcttaactcatttataggctaagtggaatgtaaaaataaggaagggtacattatccccagtgctgtgtgtactgcatttatgtgaggccgctcatcattaccctcataaatgtgccaaagctttcattcttcagttgttccaagtaggaagttaatcatctttattaagtgtttcccagagagtcttgttttaacaaagctgcttttttattgtatgatttttagatttcatttaatgtactgagttgagtcctccaggaaaatgacattttcatggtggtcctttgtttatgtaggaccgtatttcatccgaaactacttaatttggtctatttgcataatttcttaaagtatagctgataacatttaaattagaggttggtagtttttgtagtacagaaaaaaagtcagacagcaatttgttttgctagtcttttaggacttggagttttatatgattttatatcaaaaattgttgtcttgaattcaatttaaataaatgctgtagtaatctgggtcagttcataaaaattgggttagtttctgaatcattgttataattgtggctatgtaggttttaagtgagttggttactttgtatagcatgccgaactttcattcattcatttgtttaattcattttcttacacttcggcacattatttcacattctgtaactactctgagttattgccctctttttcataaaacaaagtcctgcgctttcccatctctctgtatgtgaaaatctgtaccatgtcttgctccctttttatggctcttttgtggaattttttccttttgggagagagtgaccctaaatgataaagataaaccatgaatgatttatgaaacagaataatatatcccatattttcccaaatccctctaacttctattggtttttttcttggactaccgctgcacattgagcatacatcttcatcgagctgtccagaaagacgcctagttctttttacaggtctggaagctctccatgtgttccgcagggccaacgttaaaaaggattgtaaattgccaagaaagcaaaaataaaaattcagatgtaatgaacatcttatgacagaggtgattgagttcttggaattgaaaagtaattggatctaattgtgaagcccaattgtttatagcaggaacatgtgtaggattgatgagtttggatggtctattccacactgaatctaagcaccgttagccccaaatgaccatgtgcataatgtgtgtttgttcaagtcatgcttcttattgggtaaagcagatgacagtcatactatcccagtgatgttgaggctctcccattagaagaggggctggagtaggagacccttgtgtggtggttctcaacattttcttaatgactttatgccattcacatgtgtaatgtgtgcccctcagtagttgctctcattccacttcagtgattttcaacaattgcaggggcagatggtggtgggagtggggtgaaccggggacattagcagaatgtcggggtatgtgctctaaaaataccctccaggaaatgatgagctaccatttctctcaatactgcctgcctcctcctgttgagaataactcatatgagaacatagcaagggttataaggaaatactgtgtttaattcctggtcaataaaaatggaaattttcaaataaatggaccttctacgtagaaaattataaattatcaagattgattctaaaagtaaaaaaaattatccacaaatagaatcatgaaaataattaatgtcaaagatttatacccaaaaggcttcaaaactatatagttctatggataaattctttttaactttcaaggaacaaattaatcccaatgatataagtaagctgttcctgtatgaccccgtatgataccaatattttatcaacaaaatgcatgtgcagactatcatatatagggaaaaaaacaacattcaaaacaaatactttaaatagttaaagtcacatatctgattggtgggattgggggttttatatttttctttacattttattttccaaattatattgaacatgaaatatttttattaatttatttttataattttatatacaaaatcaatgaatcattttttcttgaagagaagaaagtggttgtgaatacagtgaatggcaggtcacttgagcacagtgtggcaattctgtgacaaacgtccactttgcattggaaaggcctctttgtggagtatctgttgtcactgtcgtttataggacctttagattcccctaggccagtggccctccactctgcctggatgttagaatcatccaggaagctttaaaattatctccttggtactggtatacattttgaacgctctgcaggtgattctaaagtgcagtgtggtccagaaccattgtcagaggctcaccgtgtatgtcttagagagttctgacattttgactcatttcagcagcaaataaatgaagtggaagccatcggtccctttggcaggataagctgagaccagtgaaagctcatccctaccttcagtctgtctttttggccgtttgagtgtagggtgtccagtctgaatatctgtccttcactgagatgcaatttgggataatagctctccagtgaaaattactcagtatgaggctgttgtttacaagaacttttcagttcaactcttcttagggaacaagaggtttagtttggttcctagtgatgtgcaactccaagaatttccattacacctggcttggatgtcaattctgtttcttatcactcaataaaacaatttattaggaaaataaggtttaaaagtgccagatgacatatagtacagcccttgtaaatcatatatgtcctaaatcttgttggacagcaggagaggtaactcagatacgtctttccttagggctcctggctgggagcttggtcctgaggtctgcgctgggctaaagaatgagactatgcagatagttggaagcaaagcgggacggccttggacaacgtctgctggctccagtctgaagcctggcgtgggctgtgggcttgtcagctctgggtccactttgttattatcacaaataggaagcccagtctcttggcagtagccaaggatgaggggccaggtgggcttaaggaatgtgacacaaatactgctttattatgcacttcttggtttttccatcgaactttaaaggtggcagtattaaggataaatgatcaggcattgcatgggagcagaaacagttctgcctctcccgaacatctcctatgtcctgttatgcccccatacttctctggtgatttatcttttcaaatcgacagccctctggagcagtaggaaaatcattaccgtatctatctagcggcaggaacactgaaagctgtcataaagcccaagctttctcctttttgccctcatcatcctgtgaaccacagagattttgtagatacaagtattttccatcaagcttatgaataacaccacttggcagaggaccctgaacaaagaaccagactgcagtgttttgtagtgacttttacatacaatgtgccttaattactggcaagcctgtcaagaacttattcccacatgtgtcaacactttcttaatacactgtaattcatcatgttagcatggcagaaacaaggtactctacgtccttacacgcgcccttctccaagtgctggtcttgaactgcatatcccttcttgagtgtcttcatctggcgaacaaagaacaggttatagcattgaaatggtgaggtccctggagcccatcaaagtcgtccatcactgagtactttagcttgggctccggagcactctccatccaagaagcactgctttattgtcaaaaggacgttcacttagtaacagcagtaaatcgtgaaaggcagtctaattttaggcagaacacttggctaagagagaatcctatcatttacccctcgtgacaattttattcattgagttcattttcatgttagttgcatgattaaattaggatcggaatgtattgctttttaataaaaaaaaggagtgcctttctggttgggggaaagagggcaggaaggggaaaggaagtctaaataataaacactgcgtttcaattggaaatagagtgatttgacatgccacattatgctttctggatcatctcttaaccctttggctcttctgagtgaatttaaaaatgggctctgagcctgatggtttgggaaagaagtggtgaatctgagccctgtctcagagaaaaattggcatggggtcccaaagcaactttgcttttaatacttattcagattgcttatttcacttttgtatttcagttttatagctgaggagagggaagataaatttatctacctcaagtttcagattacatgagatatgcttcatatgatctcttgggtaatgcatgcattttagaaagttcagaaggaagggaccacagatctgggtgtgagaagcagaaaagttttctttctggtactgctgaagctttaaagaaagttctctctgagtgtctgtcttgcaatctgtaaaacctagtgtttgatggccattccttactctcagttattgaaatccatgagtagagttcatggcggcatcttggtcaacaagggagcggccacctgttttgtattaatcttttacatttcttctcatggtattttccaataattggaacaaattacatatggtagaactatgctaacagtgcttaaactttaatatttgtcaaatattgagtatgtattttaacaagcatgagaatgccatagtacaaacatatgaataataagcaatgccttccccatatagcaacaggctagttctctcttaatgaacacattcattatacaattatgatgatgccaaagcacatagggaagcatacgtctttctgttttctagagatttgcaatctaattgcactctgtaattcagttaagcaaaattctaccccatgttttcctctgtccttgactcttctttctgtttcgactaagttcaaaacagaacctattagtgctaatgagttcattcagttcagttcaaaacagtgctaataagttcattcattatcgcctatggtcagtgcctaaaccacgattgttgaataagtatattgaagttttgaacatgacgtgttaatttttggaaggtttttatgagttggttaataaaataatattaacaacagtggtgtgtgtatggttacgagccagtaggaggggtcctgacagtaagtactggggaggaaagggcttgcagaggaggagttgtcactggagttaggcctttcctgatgaaagggcttttcagagcagaagataaggacaattccaggaagagagaaaatcgacagacacaacatctctgacatctctgaaagaagctttttaactttctggagagacacagtgttaaaatatacatcaaataacttgataaaactgaatacatcattttttttctttccggtttgcttcctttgtgtattcatggaatacacacgtgtttcctttgtgtattcatggaaccaacatcctgtcagttttccaggttctaaatctcaaaggaaaatctctttgcttcttctctttcactctgtcacccgagtccaaatgtacatggaaaccctgttgatttcattctgtaatatttctccaagccctctgctcctctcaccactccgctgtccctgatctcagactgtcaatcactgtgatctcggcctccagtctttctgcctgattcattttacgcttagctgtcggattagggcttttttgaagcacgactcttatactcttctactcaaaaaccttcactgtttataggaaaaggtccaaattccctagtcaacatgcaagcgcctcttcatttggctgtatagtacttctgcactctgtaattcagttaagcaaaattctaccccatgtttttctctgtccttgactgttctttctgttttgactaagttcaaatcagaacttactagtgctaataagttcattcagttcagttcaaaacagtgctaataagttcattcatttttgtctatggccagtgcttaaactgtgattgttgaataagtatattgaaattttgaacatgatgtgttaatttttggaaggtttttatgggttggttaataaaataatattaacaagagttagagattaattatccctagaagtattactatccgtgtataagaacaatattttaaaaattttcttctatttgcctgaaatcaatggtcctattgattactagtaaatttagaaatcctttaaatcactttcttcctaataaaattagattatgataatcaaaagtcctgatacatgattatagccagcagggaaataggaggaagaagaagatcaatgtattagagtcaatgtatagtgtacaatatacagctaatatacctcacttaacactaataagataaatgcccacgttccatgatttaatacgataaaagctaatttcttgctacacaaagtccaatgcaggtcaggcaatcttctagagcaattcttctctaggcagagactctgggatccaggctccctccagcatatgatgtcaccctctcaacacagggatgctttggcataacagtgcttattttcacatatcactttcactcatatgttattgatcagaaccagtcacatggccctgcctactgcaaggcacctgagaagtacagaggagcatatggaacatttggtgagtcctactatctctgctttagaaaatagagttagtgagaagtatgatggtggaatcccaagtattaatacagaagatgatggtctgcctcttactagctctgtcaggttgtttgacccttctgtgcctcagtttatagatataactgcatatttttatgataatagtagctacttcataggtagagtttaaaatccctgcaaaacatttggaaggatgcctggattattttaagtttcacttgatgatagctattattattattaatatgagaaactaggaatgagagacaatggagaccactgaagtaaaattaatttgaaataaaattattaaaaataaggcttagtatgaaaactaaaggtctgttttggctttgataggcttcggtaaaacaatcacagtggccaaggggtctatcaggttattttcttgaggaattcagataaagaaatatagttattttattattattgtttttaaagtgctctttctgaaaattaggctcagaagaccagattttaaacttatggttactatagccttgtagtatagtttgaagtcaggtagcgtgatgcctccagttttgttcttttgttcttttggcttagggttgacttggcgatgcgggctcttttttggttccatatgaactttaaagtagttttttccaattctgtgaagaaagtcattggtagcttgatggggatggcattgaatctataaattaccttgggcagtatgagcattttcacgatattgattcttcctacccgtgagcatggaatgttcttccatttgtttgtatcctcttatttcattgagcagtggtttgtagttctccttgaagaggtccttctcatcccttgtaagttggattcctaggtattttattctctttggagcagttgtgaatgggagttcactcatgatttggctctctgtttgtctgttattggtgtataagaatgcttgtgatttttgtacattgattttgtatcctgagactttgctgaagttgcttatcagcttaaggagattttgggctgagacaatggggttttctagatacacaatcatgtcgtctgcaaacagggacaatttgacttcctcttttcctaattgaataccctttatttccttctcctgcctcattgccctggccagaacttcccacactatgttgaataggagtggtgagagagggcatccctgtcttgtgccagttttcaaagggaatgcttccagtttttgcccattcagtatgatattggctgtgggtttgtcatagatagctcttattattttgagatacgtcccatcaatacctaatttattgagagtttttagcatgaagagttgttgaattttgtcaaaggccttttctgcatctattgagataatcatgtggtttttgtctttggttctgtttatatgctggattacgtttattgatttgcatatattgaaccagccttgcatcccagggatgaaacccacttgatcatggtggataagctttttgatgtgctgctggattcgttttgccagtattttattgaggatttttgcatcaatgttcatcaaggatattggtctaaaattctcttttttggttgtgtctctaccaggctttggtatcaggatgatgctggcctcataaaatgagttagggaggattccctctttttctattgattggaatagtttcagaaggaatggtaccagttcctccttgtacctctggtagaattcggctgtaaatccatctggtccagcatggtactggtaccaaaacagaaatatagatcaatggaacagaacagagccctcagaaataatgccatatatctacaactatctgatctttgacaaacctgagaaaaacaagcaatggggaagggattccctatttaataaatggtgctgggaaaactggctagccatatgtagaaagctgaaactggatcccttccttacacctgatacaaaaattaattcaagatggattaaagacttaaacgttagacctaaaaccataaaaaccctagaagaaaacctaggcattaccattcaggacataggcatgggcaaggacttcatgtctaaacaccaaaagcaatggcaacaaaagacaaaatggacaaatgggatctaatcaaactaaagagcttctgcacagcaaaagaaactaccatcagagtgaacaggcaacctacaaaatgggagaaaattttcgcaacctactcatactcatctgacaaagggctaatatccagaatctacaatgaactcaaacaaatttacaagaaaaaaacaaacaaccccatcaaaaagtgggcaaaggatatgaacagacacttctcaaaagaagacttttatgcagccaaaagacacatgaaaaaatgctcatcatcactggccatcagagaaatgcaaatcaaaaccacaatgagataccatctcacaccagttagaatggtgctcattaaaaagtcaggaaacaacaggtgctggagaggatgtggagaaataggaacacttttacactgttggtgggactgtaaactagttcaaccattgtggaagtcagtgtggcgattcctcagggatctaggactagaaataccatttgacccagccatcccattactgggtatatacccaaaggactataaatcatgctgctataaagacacatgctcacatatgtttattgcggcactattcacaatagcaaagacttggaaccatgccaaatgtccaacaatgacagactggattaagaaaatgtggcacatatacaccatggaatactatgcagccataaaaaatgatgagttcatgtcctttgtagggacatggatgaagctggaaaccatcattctcagcaaactatggcaaggacaaaaaaccaaacaccgcatattctcactcataggtgggaattgaacaatgagaacacatggacacaggaaggggaacatcacacaccagggcctgttgtggggtggggggaggggggagggatagcatgagacgatacacctaatgttaaatgacgagttaatgggtgcagcacaccagcatggcacatgtatacatatgtaactaacctgcacattgtacacatgtaccctaaaacttaaagtataataataataataataataataataataataaataaacttatggcgtggataaagaggattcagttaacaagaccagtcttttaattatgggatagtagaatgaactggagggtgatcctcagcttccctgcaatagaagatgataaaataattcatttatgaggaaacctacacctttggggttcacttgagccaaacagacaatggagcctgctggagcagttcagaatggtggtttcagcataccctctggagctgggctgtggactccaagtcctgactcagtctcttgccagttgtactgccttaatcctcctatgtctcaacttcactatctataaactgggtataataattatactcacccacccagtacagttgttgtgagaatgaaagacattaatttatttaaagcactttgaaaatgctagctccatagtgagtggtcattgattgctagctgttattattttctctctgaggacaatgaaaatgtaaaaatgatcaggagagtaggacagaaagtctggatgagaaatggtgaaaaatgtcagcggtgcacagcaaatgttgacagtgaggtatattaagctgtagaacagagtccccaaggacaagatgaaatctgctgtttgagtcatgtagggtcagacaaagtaccagagaataggccataggaagtgttctcatgcttgtaagtttagggacaagatgatctaataaggtatttttcaccttgaagttgtctgatgactgggttagaaagctggagaaactgacagattgttcttttcagggagggaactatgctaggcaagtctgtgtagatttagtcagaaatgtagttctgagtgcagtgtcaacatgcatcatcacttacagaggtaggagctcttcaggttccaaagtcaggtgcggaatgaaggcaaaacacctggctaatttgggccaaaatgctacaaaatgagggaaaggaagcctttgaatttaaattatctggaaaatgacttcaatttccaacataattttgtatgttataaacatttcttactgtagatattttggaaggcaagtgtgtggattaaggatcttttcatcagccttaataaagaaggtttgcaatgttttttatttcttggcattatttttaatgtctcacactaaatacagatgccaggtacatgttcagataagtagccttacttccaattttatttttccttagccaggagagggaaatttatgtgcattggtagaaataatgaaaaggaaatttagcatcctccaaaaagtcataacattatatgaggatacctagtttatatgagaatacctatatgaggatagtgtgtctttcaaaaagtatttttaatattatattatttatatttgaaaataaataacaactttcattttcttaatataagttacttaaagtaaacattgtcaaaattgggatggtataaagaagaggcaattattattattattattatttttgagacagagttttgctcttttgcccaggctggagtgcaatggcgtgatctcggctcactgcaacctctgccttccggtttcaagcaattctcctgcctcagcctcctgagtagctgggattacaggcacccaccaccacgcctggctaatttttgtatttttagtagagacagggtttcaccgtgttgttcaggctggtctcgagctcctgacctcgtgatccgaccacctcagcctcctaaaatgctgggattacaggcgtgagccaccgcgccggccaaggcaatgatttttaatggtttttgggaagcagattttataatatattaaaggaaggtgtgtgtgtgtgtgtgtgtgggtacgtaatacatacaaatatatccattcatcttttaataaactaggttcagcatctcaacatatgaagaccatactttttgcctaggataagctcagtttattctcataccaaggaaaagcagggcagtatagtagcaaagttacagggacagaaattcaaagagctgggttcctattcagctggggttttaattctgaaaccttgagccaatcacttcaactcagtgagcatgtcttctcatctgtgaaaggggaataataataacatccttttatgatccataggataacaatgtacatatataaatgtcaaaattttttcaattgtgaagtgctaacaaataaagatactataataccataactgccatacctgaacttaaagcagacagcaaagactcactgccaatataaacacacacacacacacacacacacacacacttgagtattgttcaagtacaccataattttttgcatttttggctaggctgttcaatatttattttacaaatgtttgtcctatcttcactttagaagagagggtgaccagaagtgcttaaatcaatggtgaaggaaagcacaataactatcttttttaacctagctttatccaactcccccctgcctgctagcatgcctgatctgcgcatgaatataaatataaagaattattttaactttttgttagcctcttctccagataaatgggaagttttttttcttcaacttttattttaagttccaaggtacatgtgtaggacatgcagttttgttacatgggtaaacgtgtgtcatgtggtttggtgcacagatcaacccatcacctaagtattaagcccagcatccattagctattcttcctgatgctttcccctccttacttcccctgacaggccctagtgtgtgttgtcccccaaccccaccatgtgtccatgtgttctcatcgttcagctcccacttgtgagaacatgcagtgtttgattttctgcttctgcattagtttactgaggataatgtcttccaactccatccatgtccctacaaaggacatgatctctttccttcttatggttcctagtaaggaatgggaacatttaatgttcaggtctgaaataataatttctctgaaatgagcattcttttgcttattcagacttccttccattgcttctggcgtcattttggcatgaaacaaacatctggaaactcctaaccctacgggatcttgtcttctcccttgggaatttgtgattggacttttgacatttgacctcccccatactgctctcatggagagccttcatctcacagtagttgcaagaaggataagatatttatagaacatcccgttattgtacaggattgtgtctctagggttaaatactgggtttctgcctccaaatgagtagtttattgtcttcttaagtactgaaaatgtacagagttatcatagttaaattcttattcctaaaacaaaaacaaaagaaaatactacttgctaatttctttctatttttatatttttggatggcttctattgctttgcagtagcaaataagagtgttacagaattgttttccccagaatcgaattgcctttagggggtactccatgtatatgttttagcaatgatgctgttctcaaactcaaaaaatcactaatagaacagataagcatgttaaaatgttagccatttcttcgaccttgtaatatattttctgacagttgagataattggtgaaatacagaatctagatttgtgctgaaaagtacttaggaaaattagaaaatattgcaagtcattttaaaacaggaagaatatctgtggaggtgatgggattcctaagctagctcatgagattataaaagctcaagttaaaatgtgctgtggccttatggagaataattccaaataatttatgtagatactccccctacccaaagagggtagtgtaacttccattccttagctctcagttgaatgtagtgacttccttccaaagtgtacagtatggaaatgaggaaaggggaaggaagagtaattttacaattaagaaacctgtcagactataacagtcaggtggttgaggccaatgttgacagttataatgcatgttgacagtatgtaccattggtataatgggatgaaaatagctttttacttctggggacttcctcctaataatccgtaaccccagtctgaccttgaggaaaacaatatacaaatttcagtagaggtgtattctacaaaataactcatgagtagtcctcagtattgtcaaggtcatcaaaaacaaggaaaatctctgagaaactgccatagcaaagaggagtgagtcaaagaggcaagataactcaatgtaatgtggtattctgtttgggatgttgatgcagatgaagggcagtagataaaaactaaggaaatctaaataaaccatgggctttgggtaatagtactatattaatattggctcattaattgtaataaagatatcatgctaatgtaaaatgttaacactagaggaaacggggtgctatggtttgaatgcatcccccaaaaagcacatgttggaaacttaattttcagtccaactgtgttgggaggtagggcttaatgagaggtgattaggctgtaaggggtctgtcctcatgaatggattaatttgttattgagggagtgggtttgtggaaaaaaagggtacgtttggtccctctctctctcgccctccctctctcaccttctcaccatctgctaggtgatgaagcagcaaaaaggcctttaccaaatgttctttataaattactcagtctcagctattctgtgacagcagcacaaaatggactatgacaccgggtgtgggttatatgggaattctctgtactatccttcaattactctgtaaatctaaaactgctctaaaatataatgtccgttttattttaaaaaggcactttggcaactgtccagctgatacccttctagtgatcaaaactctgccaatatttggtgtcttcttgaattccttgaatgacaggcaattaaccatttccaaaagtgatacttcgattaatgcacaactcttagtgtttagtcctatttgtttattttttttggtagatagcagtagctaccaaagaaatttgaggtggctaggattagctactccccaacaaacatcctactaagctgtaaaaatacacatctcagaagagattctgcccccatgcacttattttactacctttcattagcaaatgggtacaaaatagttcatatagtttgtaggtctgataaagtctaagctctcttttctttttggcatactaaccacatttcatatgaaagattgactccaagcagatgtgatattcgagtcaggattttgtaccctacaataggcaccataaaatcagaattcctcttaaaccaatgattgaaatcaagcatcattcctaatcattcaaagtgcaggatttgttggattttccgactgtattcattcaagagtgcttctaaactgttttggcccatttccctgtcttggtacttctaatgtcaccattgaagccaagtttagtattcatcatgctggtcactagtttaatgaataaaacccatttttttaaagcattcaggatgctaattagcaaagcttgttgattgaggtactggtatctgaaggacttgtaatacatacttcagagcatggccttttctgatgtaatataggtgaccacccatgaactatgcattcttgatatcatgtcagctaaccatccttagaattaaagctttaactggtcaaacatcatagtacattgattatatgaagtaaattacagacattggtacaagtgagttctatttttatttttattattattttttgagacggagtcttactctgtagcccaagctggagtgcagtggtgcgatcttggctcactgtaacctctgcctccagggatcaagcgattctcatgtcccagcctcccaattagctggaactacaggcaaatgtcaccatgcctggctaattttttttttttttttttttttttttttttggattttactagagacaggatttcaccatgttgcccagagtggtctcgaactcctgagctcaggcgatccgcctgccttggcctcccacagtgctgggattataggcgtgagccaccacgcccagccaaattctatttttttaagaaacaactcaacccagaaatctacttttgtgtcccttctatccattgtttcctttgaggcaaaaagcattatgtgtgaatttgcatctgaggtgaatgctatgcttgggtgtgttatatctgagagtaaacttcaagtgctgataattcttggggcagcatggcaggggaggaggagaaaggaagaagtgggataaacatggtgacagagaagaagtgctttagatccactgtttgagaactctagtggactgcggaaatcctaccttcctctaatctagagtttttctattttttttttttttgacaatagaacacatttggaatgcaatgcctcctaataggccacagaagtaatattctgtgtaacacataatgcactctcttaatcaaaactataatagaaggtcaaatgggaaagggacagaatatgtattcccttggtaaaaacaatacaaatgataaacacaatcatagtcatagtagctaatgtttatgtagtatttaccatatgtgaggtataacttctactaactattctaagtacattatatacaggaactcatttaatcctacaatgaatctgggccatctattatattgatggaaaattgttaccaatgattgaatagactatcacacattgtatactagaagaaattgctattctatgacaaaatggtgagctggcaaagttagagaaaacctaaagcaattaaaaagaatgggcatacagagaactaaagaatttagtatcagtagcatgcattgtacctttacagcatgaaggtcttagtacctacaatgttaaaaattacatttagaaaattagctcacagctcttgcaggtactggtgcaaagcatgtcttatttaaatgtttattatcgtctaagcttttattattccttggctgtcctagagatgtatgataagatataatctttatagaaggaaaatgacaattatttcaagttctattccttaagaaattagggaaataagaattctgggaagatggcaacaatggcattatagcttacgactattcctgaatcctctaatgaacacagtcagagtagcaaaaccaaaactgcacagatgaaatctacaacaaagcaacaaaacatacaccctaatgcatgtgtatatggggatgaaactctgatagcaaaaagacttgtgtggtatcactaaaactttgcaagaagcagagagaaggaactgagacttacgatggatttgagtggtggagaacccccaaatcatcagtgatactcactggaaagctctgtggtgtgttctgagaggaacaactgattctttgaggacgctttacaggactcaattcataggtaactgcaaggaggccatcattaggtttgatgatgctgtggctgtctgagtcgaaactcttgaaactaaccaactacagatcactttcagaacaaagctctgcactgaggagagacttcatttagaactcatattgaggaggaggagaacaacaggagcaaaggaaagagaaaatccagccaagaatgaggtataggagaagagaaagcagatctcagagagcatgaagccatgtttttgaatccttcattaaaaaaacaaacagatgcaggtgtttccagtataaagttaggtccttgctaccattgtaaaagtgtaagaatattcattttaccctaacatgagcaacagaaaaggattacagttaaaaataccatgtaaagttattataagcaaaaagagaaaatgaataaaataatgtccctacaatgaaggcacaccagaaagataagtccacaaggcaaataaaaactgcaacctaatatttcaaaacaggccaaaagaagttgagaagcaaataatagatatgaaagaacaacacgaataagaattagaaaaagtcataaatgaggtgattggagaaaaatacgatttagaaagatggcagaacttaggaaataattttaaaataaaaaaaaatcaagttcagtgttgaattctaaattagaggaaacccaagagcaaattgataccttcagagaaatagaagaaagaacaaagaaaaaacttttaaaaataaagtgaatgaagacactaaaaggatggaagagaaggtgacagctataaaaataggcagggacattaacacatgtgtattgggagtcccccaaaaaggaaccaaagccatggtatagaacaagtatttgaaattatgattcacaaaaaaatgtcctgacttgaaactattgaaagatagtactgcaaacctgggaaaaaagactcaagagatattttcactaaaactatgaactttaaagaaaaggaaacaatcctttggtcaaccaggcaaaaaaatgaagtcactgataaaggaaagggaatcagattacataagacttttcaactttactgcagcagaccatacaataatgcatttaacaaagtcaggagttgaaacagtcaaagatatcataccttgtcaaactgacaaacttatttcattataaaggttagagataaactgtaataactatgcaaaaaaactcaaaatattcttcccttgagaattcatgaatattctactgaaaaataagtgttagtttgcaaaagcaaacttgaacacatgaaaaggcatacttcttggatcggaaaattcaacataataaagttgtcaatcctctttaaattaatttataaatgtaatgcaatcccagtaaaaattccatttttttttataatcaagtagacaggttgactaaaaagtttatttggaataagaaacaagaaagaatagccaggtaaagaacaaaaatggagaatatactaatggaaattgataatgcaaacattataaagccttataatttaaaaagtatggtttgcatacacgaataaacagaccaatggatcaagatagaaaatccagaaatggattcaattacatatgcaaattactggagaaaggagatggacttttgaaaagtgtttttgggaaaactggatgaccttttgcaaagataaaattggatccattcctcacactgcacatcaaaataaactttaaatatattagagatttaaatgtaagcaatgacactgtataagtaacagaaaaaacatagtgaagcactttcctaactatgactgaaaatgcagaagcaacaatgggaaaggttgatacacttgataatatatgtatacaaacaaattttacatgactgaaaaaactatcataagaaaagcaaaaaacaaaaagagagacaaatatgggaaaaattatttgcaatttctataatggacagaatgttatatttttatataatacagcttctaaagacagagaggtttttagagaccaatgactctatagaaaaatcacctagagatagacacaagtcacaaaaaaatgaaatgcaaatacccttggacatgtgaacagatacacaatctcgtgcatagtaagagaagtgcaagttaaaattatgttgacatagtacttaactatcagattgataaaaccccaagtttaaaaacattctgagtgtcatttagagctagagtttttggcatgcaaaaaagaaaattcaaatatgagatgaaggaggttgagtaaaaaggcagcagtgtaaactgagatatattttatctcaaaaaatatcctacatactaaaaaaatccatctttttaatgcaaagaaataaaacccatcaccagtccagtgacaatgagtagctgtaggattcagattgtgttctttaagtcccatttccccatagaaagaaccaggactccagagaaatgggtgattctaactctgggatagaaaatgtacagggatagtctggagcatcttgtcacaccagaaagcaatgacgctcaaggaagttataagactacgtaagaggatatgctgaaaaggaaacgttttgaagttgctcccactggctaagttttgagcaacaataaggacaaaagatgtcaatgaatcatgatacatgaaatatatttaaatgcatgacttttaatggtactaaaaaacatcacattggtcaccttagaaagacttgaagaaccaattcattattttaaagaatagtaaatagaaaagaaatagtaagcatttatcctgccttccctatactaaaagtacttcagaataaacaattgatgaagggaaatttctcttagagacagagtctaggtaatacatgggaaagagatgagaattaaagtattatcactttgcaacatttaatggattaacagatccaggcaattatcatcagtggttgccaatatatgtatataacttaatgtataatactaatttatattataatatatgctatattaatttaatatatattagcatatgtataatttaatatttaatatataattatatattacatatgtatatagctctataagtactatagataatatatattaatctaattttctctgtcatctattatttacctattatctctctctactatctgtctgtctatttatcatagaaaagaattacgccttggtaccaattcagtcaggtgggctcacatgattgacttttagccccatcttttgcttaaaaataaaaattacatagtactgtaggaagactgtagggagctgagtggggactaagagagcatacaaactttattttacaactatccagtccaccacctatctcacagatatgggtgcaatttctaagtcaaacactatctcataactgactatatatggcttttcctggggtgaaatactttgtttttgctttcggcattccttccctgacttgcctttttagttgttgtggggactatgtttttaaatccacgagatgcaaggaaacaatggacgcctttcttcgctgcttgtaaaggtcatatgagaaacaagcatgagcagagcagttctgactagacgtgcaagcacacacagaacgggacacattcaccgcgtcgtttgtcagcattaaccctttgcttataccaagaaaaggaggctgtgtttctatcttcagatggttttggactgaatttatgtgaagtagaaaacaggagtgaatcactgaaatttttgcttgctctgttagggcttgggaagacccaaaatggaggtggcgtctgagtccaggaagaaagaggacgtttatgaaacaagaggtcagggattttcctctcaggtctcacgactgtaagcagatcagagctgccagatgactatgcaatgcctctagcaccataaggaatattcccctccaacaccagttaaaagaaaaataataacaaactagaaataagcatagaaagtacagataagtacaagatagtaaaaaatactttaacttttattctttttccgtgttattattttaatagtttttataaaaaattaagtatcaaattctcacaaaggttattttctcatcatttagtgttctcaccttgttgggggcctaaacacttgtgttgcttttgggtaatctagtactggctcagatccatctcctcagaagtccaagaaattacttgtcaggaaacttggtaggatggtctgctcaccaacgtagtttattgactgctgcttttacactgatctaaaaatactctttatttttggttggaatatggcttattttgggagaaactggtgaggttaggtcatcctcagatttctgcaaaatattttattataatagacctagctattcatgggaagattataatacctcatggatcatctggggaaaatacctggccttcaaggccactatttccagcagcaaacataaaaatcctttaatccatgtcccacgcttaggtttcttaattcatgaaattctgcttatgattgccacatataaataagaaaggacttgaacatatgtgagctataagaaacttttgtaaagcaatgcaactcatgggtttaaacaaatacttttggcagctttgttaagcatacatgcaaaaagtgggtttgcttcaccagtaagggatacagaaaaatccaagctctctgacctacatgtgacacacacaggataataattaatgataataataagttttaaaaaatctagtatgcctttctatcaggatggagcaagagattaattacacattgtacatcataatgtctgaaagcctgagaacttgtgcaatctgaattaaattttatgaaacaaaatgcatggaattgatgctttcattttgaatacacaagtctttttcttcttatattctttccccctctcttttttccttctctccctccttatcttagcacccctcctccctgcttctaaaagaagagaatactgttctcaggactctctcagcctttctcaattgaaagcaatgattctgagtcactcctttatattaagtgaaatactcttgcatgaatctctagggatgaagtgattagcccagcaagaagccagcggattctggttgtccgtgaaagtggtagaaagaattaaatacaattttgcaaagataacactaaaagaatggtattttctttcaaaacatgtccttttctgaaacatcagtgcagacgtatgtcaagatagaaactggatcatatttctaacagttgaagactcagatttcatcaaacaggactgcttgttctcatgcccaaactgtatcctacactgtcctgttgtctggactataatggaacataacattaacttcggacagtggaggttgtgttggtgccaaccttgctaatgaacatgtggtttccataataatgtggctacttgcatattaggtggcaaggtgccaggtacgtacttaatgttgagggggcaactgatgtaaaaagtaccatctcctgatatgattgcatttccaaaaatactctgcacctggactgaaactcggcaaaatgaggaatgtcagtcagcatcaggaagtttaaggcattgacagataaggaggagccctgcagattccaggcatgcactctgtgagcctcaagcatccatcacaaggtcttgatgataacaaaatgggtaacgtcacagtgtgaaaaacagcccgacccaggagggtggtgggtgggggaaggtttaggaccactccctgcttcaagttcctggtgttctggactcaggcacttgagggtctgaaagctagaagacagtgaaatgagttacagtttaatgatattcccactacactgacaaaatggattcagttacataatggtagcattaaatgttattaagaagggatccaaagtcttggggccagactttcacaaaatcatgataagctgcgaaaaacagctgaaatagcacatttataggctttccagtcctcaatttgttgaaggggaaaaaagttgttatatttgctcaaacattctgcagtgttggcctataatcaggggcttagtggaggggcggggggtgtcaggacatatctgatttgattattatatcttaacttgcatttttgttttcctgaaagcttttgtgaagtacagagctaaatggtttgcccaaggccttggttgcttagtagggcagtgatttttcttggtgtcaagacctcctctgtagagtgaccaggtgtagagggtagactgtttttcttcatttctatcttctctttgtataagagaagcttcatttttttaaatctgcattttataaaattgattcattgtggtatgtagttttttttaatgtttaatttttgtgggtacatagtaagtgtatatattgatggggtgcattagatagtttgatacaggcatataatgcataataatcacattgtggaaagtggggtgttcatccccacaagcatttatcctttgtgttacagaccatccagttatactctgttagttatttaaaaatgtacaattaaattattttgactatagtcaccctgttgtgctatcaaacacaagatattattcattctttctgttttttgtacccattaaccattcccacctcctcccagcatcccagtacccttcccagcctctggtaaccatccttctacataagttcaattattttgatttttaccccctagaaataagtgagtacgtgtgatgtttgtctttctgtgcttggcttatttcatttaacatagtgacctccagttccatccatgttattgcaaatgacaggatctcatccttttttataactgaatagtactccattatgtataagtatgtagtgtatagtttggactaaggtatctactaccacaatcaacatgccaagagttccatcacttccaaaaaatttctcatgctgcctggttgtcatcagtcttttttctacctccagcctctgctaactgctgatctgttctccatccccatagttttgtcttgttttgaataacatataaagggaaactatagcatgtagtctcttgagtctgacctatttcattagcaaaatgcatttgagattcattcgtattgtttcatgcatgagtaatttacttctttttattgtaaaagagtattccattgtatggatgtatcagtttgtttatccattcacccatggaaggaaatttgtactatttccaatttttggctttaattattatatttttaaaccatcttattgaagtataattgacatacaaaatctgtccttatttaatttatacaacttgatgagttaggagataagtatgcactcatcaaatcatcaccataaacctatacttcaccataaatcatgccataaacctatacttcacttccaaaaatttcctcctgctttctttctttattataataataattattattattatttgtgataaaagcactcaacattagatctgcttttaaagcaaaattttaaggatacaatatattattggtaattacagtccctgtgctttacagtagatctctaagattatccattttatataatcaaaactttgtacactttgactcataccttccatttctccctccccacaatctctgaccactatccttctattctctgcttctatgagtttgactactttagattcattacataagtaatatcatgtagtatttgtccttctgtgtctggcttattttacttagcataatgtatcccaggttcatccatgttgctgtaagaggcaggattttcttcttttttaaggatgaataatattcccttgtatgtatatattacattttctttatccatttaggagtcagtggacatttaggttgttgctttgatgcctcggtgattgtgaataatgctgcagtgaatatggaaatgcagatagctcttgaaaatactattggcttattatttatacctcttttatatttttacttttagtggttgccctagagttacaatatttatctttaattaatctgagtttaccttcaaataatattaaatcacttcacatgtagtgtatggaccttgcaacagtatattcaaattccttcatcttttactttatgctatacatttaattttacatatgctgcaagcacatagtatattgctactattttttttctttgcataatcaattatcatttaggcacttaggagtaagaaaatgcatttttaaatctttatttatttcctttcccacaactctttatttgtttgtgcagatccaactttctctctggtgctatattacttctacctggatagccttctcaaacatttcttataatgcaggcctattaccaattaattctccatttttcttttcgagaaagattttatttcacctttagttttaaaagatgttttcctgggtacagaactctggctgacagtttttaaaaaatcttaatgatgtcactccattttctcctggcttacatgatttcccacgagaagtttgttcttatttttgttcctctgtatagaatgtatctttagtttagttttgttttaataaattttatttttagaagagttttaggtttacagagaaactgcaacagtagtacagagagttccagtatatctcatatccggtttacccattattaatatcttatgttagtatggtacatctgacccaatattgaaaaattattattaactaaagtctgtactttattcagatttccttagtttttacctaatggcatttttgtgctctaggatcccatctaccacattatgttgtgatcatgtctccttaactcctctaggctgcgacagtttttcaggatttctttatttttgatgactatgatagattgaggagtactggtcatgtgttttgtagaatgtccctcaatttggatttgtctgatgattttctcaagattcgactggggttatgggtttttggggaggaagaccacagaggtaaagtgccatttttgtaataatcatattaaggagacttactgttaacataacttttcactcttgatgttgaccttgatcacgtggctaagatagtatttgtcagatttctccactgtaaaattactcctctctcttttacttttgaaatctttggaaggaagtccatataaacagcccatgattaaacaatggggagttaggtttattctccttaagggtagagtaactacataaatcatttaggatcttctacaagtgagacttgtctcttcttccccgttatttatttatatcaatattaatgtcttttatttttggctgccttcagaaattttctctttctcctctctttgttttttatcatttggataagacatatctcaggtttgttttttaatttgtttgtttgtattgtgtgtatcctcactggtgttctttgtgtttcttggatctgtggtttggtgtctaatgttaattttggaaaaatcttggttattatatgttcaaatgtttattctgccctattccctctctcttcttgtagaatttcaattaaacacatcttaggtatatgtcattgttctacattcctttgatattctattctacttttttcattcttgtttttcttttaattcaaataacttatattgacctatatgaggcttactgattctttctttgactagtcaaatgtattgatgatacactcaaaggcattcttcatatctgttacttttttattattattatttgtagcattcctacttaaatcttccttagtactctctctctctgctgaaattacttatctgatcctgtgtgttgtctccttttcccattagaactttcaacatattaattatagttattttgaatttcctatttatggttttgatatttgtattatatctgagtctgcttctgtcgatttactcatgccactgtgttgtttttcttgctttatttttgtatgctttgtacttttttggttgaaagctgtatactttctgtaggacaatatatactaaagtaagtgatttttttttttttttgagacagagtcttactttgtcacccaggctggagtgcagtggcacaatccaggctcactgcaacctccacctcccaggttcaagtgattctcctgcttcacccttccaagtagctgggattacaggtgtgcgctgccacacccggctaattttttaaaattattatttctagtagaggcaaggttttgccatgttggctaggctagtctcaaactcctgacctcaggtgatccgcccgcctcggcctcccaaaatgccgggattacaggtgtgagccaccgtgatggccaggtaaatgatttttattcctggaaatgagcacatttccttctgctaggactctaatgtggattattgaaccaatctacttagggatttaattggaatagagattgctgttgctctggttaactacagtgtactacagacttcaaattcctgtagtgacactttgtgtgttgggtggaggctggttcgccagaaggctttttcttaatatccattctcagctttaggtctttattttacactatgccttagagatggtctctttccatactcatttaattcttccaccattactaactgttacttgttacttaatgcttgttagagtggtggcgtggggtcaggagtccattcttcattcttttcatgaagcttgtttttaggcaggcactgtgtgtctctggagacctttttctgtattttttactttaaaaagtatggagtccattcataaggatgctggcgggggcagtaaggagatatctggatgtactttaatccaaaaaccatattttagcatgttctatgtgccagatcctgggccagatgctctaaatgcaaatggacaatgacgtggttcttccaattcagaagctctgtatcagagaaccataaactggtaaataggtgtagactcaaggtactttgaaacccaacagagggcttttttgctcagtgcagatgagggtgatggtcagggaatctttcctagatggactccatccagaccaccatctctctaggacatctgattttgtgctccatcagacaaaaggcaatggtttgagatgagagagagaaagacctaagtatttgaagtaaggatacaggaggtgaggaaactatggagaaatacagtgccctctgaaggtcatactctcaacattacttcaggtatcttcatagtgctatctctagaaaaatcaagggtttttttttgtttcagacaaatctgaaatctgaaatttgaaatctggatttctcacctacaagttgaggaatcttaggaaaattactttcccaacgttcacttttctcatatataaaatgacaaagatgttttctgtcccattggattgctgtaaacattatgtgaaacatcagcttctagaagatccataataagtagttactattattgttgttgttatttgcagccactaaattgaattgtttttaattctttaggtaccctaatgacaagttcaccccagtgttttctgaggagtctacctggaaatgagaaccatctgtccttcctatagtagttcttctcagaatgccgactctatgctaatggtgagaaagtagcttccagatcagaccccctaaaaatatatctaaaaactcaactcctgtggtcatctctttcaagtatttaaacctcagaattttctccagcaagcatataggccccatagagtccataagcttgcaatgtcttggccatgtgtacccatgtggtacattcaaccaccaaactggaatacgatattgcatttcctgggcaggattaagagtgagctctcttaggctcagatgacccccacaatcaaaggtaagagggctgtaactgaaatatcactcaacagtcatgccaggaataatggacactgaaacgactaccatgccttgtggtgagtgccctcctttggggattagcaagatggtaggggatgtgcagaagactgcaatgggtctcttaacccttccttccttcagtatataatccaggttattttagaaatagaacaccagtgatgtgtttgtgacaacttctactggtcctgtaatctagttagaattgggtggatgaccccttataaatcctaactagattacaggaccagtaatgtgtcagtcttaattaattcattggtttatttattcattcattctttcattcatttttttacttgttcatccattcatcaaaagtatttttagtactttacctactattagctgggcttcagttaaataattttgtatttttttttccttaatagaacttatgatctggtggaaggacatgataactaatcaaataatcacaaatatgtatttcagaggtaattattctaaaggaaagttatctgacttggtttttctgggaagtcttgcctaaatgagataatttttgaagtgggtgagctggccacttagggcttgggagaggttaacagaatgaggccacaggtaacttcttgggcagcatgtgcaagggccttggggacagagggctgtggtacgtttgatggactgtgaacagaacagtcaggctgtagtatagagagtgagggaagagagtggtgcaaaataaagctgaaaatatgggcatatgtcaggtcattcaggactttgtaaggcgtgtgaagggtttgggttgtcagttgaagggttagggaaaccactgaagagatttaagtggggcacggttgtggaggggggtggtgactgtgtaatttgtaaagaacacaaagattgcagggtggagaacagattgggaaggcagcaagtatcaatgtaggaagactggttagaaggtataaggaggttttattttgtttttttcctttgtagatgggagaaacttgagtaagtaaatgtcagtgggaaagatccaagcaagagagaaatgctgaatgaaaaaaagaaaaaagagctagtgaaagcttcctgaaagccagtgtaatgattggagcaattggccttagaaaggagaagggctaattttattctacagaaaggagaaaaaatgggatgggtgcagatataagggcccatttttgtgggagttcctgtcttgtggcttttgttttctgtgtaaagtaggaagtgaggtcatttgttaagagtggaaggaaaggtgcaagataaaaaagcaagtcagagatctgaggagactggagaaagtttgagaaattcactagagaggtgggagagagaactgacaggtgcttgtggaaatcttgctgatatgtgttgaggacgtgctggttttgatgttcatgacttcacaacagtgcagatccactctgtgtgtggctttcatcagcaatacttccgtatttgggtttagaaagattaagggaaaaaaggaaaaaaagacagttgggttcaggcaacactgggatcttgttagcagctgctaatataaagacagaaaggaatggagtttggggccctggcaaatatgttattgaaatgacatataatgaaattcaagcttagaaagggggaatttgaaaaagaaggctgatagattggaagagagtagaagagtcaatggaaggggccctgaagaagttgaagaacacttgtaatctgaggagtcgaactagctagctggatagaaaggagttagtaggaaactgatttagtgacttgggtggtagagaggtttggggtgatgacaagttccagggtagtgttgggagacaattttccatgaatatttttacgtttctgcacagtcttggctttctgagcaaagaaaattggcaaaaatggttaaacaataattgaatagcaaatatgcctgagaagctagaaatagtgtattgttccagacagatttagagaattcgctgccatagagtcatttgcattacatttctgggtagcaaaaacctagggacctttccctcacatcctcagagagggtttcttacattccagagtgaaagtctctctctctttctttccagaagaaatgaggggcaaatgcactagctgccctatgtaagctctaagtctcatcatttcggggatcctctcctgtgatgcagctttgctagaaagaactaatatttgtatttttttgcaccatctgttctgctgtatcgtggtagaagtcatgtaggttcatatgagatctttcttccaagcaccttaatgttttgaagagataaaagcaagaagcaagctttcttacaattcatgaaaaagcccaatcaatatgcctcaagaaacaaagctgatgtataataaaaattattatcccagcacatgtttttgaattcctatagactttaaatagattttaaagttgagatgaaactggtctctattagaagcaaatgccctcaaagactttcctcttgaagaaggaattctaagttccagtatttaaagctgaaaaagatcatccgactgtgatgctgggcaaatgccacagaagatttaactctgctattgtcttgattgttttcattacacagttttataagttttctgggctgtatagactctgtttttactgataagtcctattattgacaatgcctgactttgcagagttctaggtttttgaaaacaacgtagctttatgggagaatctgctgtatttctttccatcttttgcattaagtacatagtttttctttgatcataaaaatacatcagtttttctaaaatttttttttaattttaaaggatggttgatattgttactgtaacttaaatgacaaggaacacactgccttctacatactagcactcatttaagcataataaactaaaattttatttaaaaatatcctgaaaatcccccaaagcatataaattacttacaattccagcacatttaaaaatgtatttaagtaaaccaaagttttacttccctctgtccatctaatttaatcttccgataacttctatagcagtttgaggtatagtttgacttttttttctatgcttatacagatatatttatacatataccaagtctatatctgtctacatttcaatgtatgtatctatgtgtctaggtccctgctgataaacatagaaaatatgtatatgtgtatgtgtatatatatatatgtatttcttttaatgatagaatcatgctacatatattaaatacttatttttcttaatgctatattacaggcttacttccaggtgcatgtaagtctatcacattctttgaatgtcccatagtgttccttgtgtggtgtactggttatcactgcacaacagatctccctgactccactttttgacaggggagtgccatatgcatacaggagaaaaggaattgatcgtagccacttggtgacaagtaccctactctaccttctggccaccacagtttatctctcatgtgaaaagtacactaatttcctcctaaaactgccctgaagttctcatcccatcatagaagtaggctcagtctcaagatccagaatctcactattgaaatcaggaccaggttcagtacgctgcatgtactgtttctcaggtgcaacttgttgagtgtggttccttaccatctgaaggtccattaactaaagagacaagttatatggcccccagacccaaaaaacaatggtaaaactgacataggataatacaaaaaaggggagagctgcagcatgcagcagttactatttcacagcaattctgaatctcagattggcacaatagtgccaggtgccaaattagggcccagtcctgttacctagaaatggttcttcatagctcttatctctgctttctgagtcatttcttcttatccataagaaatgggttgtaattgttactgagtggttatctcagttggcttgctgactgtagaatgttgtggctctttttattttgaactgtttctgtctcagtctaagctgatggtgtttttctaagtactagtctgttaacaattttgtgcatcgcctatgaatcttattggggctcattcaattggacaaaagcaatatttataaatctcttataggtaaccttaaatctttctaaggtttcataaaatgtcttacagccacatcttttactttatcataaccctaaggctctttcttactttgagacccttctgttggctacacagaggattctaggacctctatattttctccaaactatattttaaaagggaacagttctgtctcctgctcatctctttttatctaccttatatgtagctaaaagaaactttttggcagaactttgaatgttctgtctggaactctccagtcaaattcaccaattcattagaaatattttgtattttccacattgtcatgggtaagatattaccaaacttttcaccattacataacactagttctacttcttttagcctccaataatattatcctcatcgtcgtttcaaggccttccggcctttgcccactgcctcatccaaagccaatgtcacatgttttagatttagattttgttaaggtagcacttcacttccaggtatcaatttctgtcatggctatcaatggccagataacccctcactccaaaagttagtgactgaaaacagctattttgtctctcactgttctgtgggttgactaagctcagttgtgtacttttcattttaagttactaatgaggttgctgtcaaatggtggcaggactgcaggactggagttcaaggtttgactgagttggatatccaaggtgacttcttcatttacatattgttggtggctcagctagaatggctgcaacagtctgagaatagcaggtagtttctccctctccatgtgacttctcacaggactagcttgggctttctcataacaggaaggtctcagtttatctggacttctcacatggcagctggcttcccccagagcatgtgttcccagtgaccagggtgaaatctgaaatgcttaagaccaatcttggatgttgtatatactttttctatattctattaggcacacatgccagccttggtttaatgtgggagggaaatagacaagagccataccttcatctttggaggtgtggttcagtagggggccagtgttggagactagttaccatgtgtggatataccataacttatttaaccattcccctattgggttataataatttggagtatttaaattattaaattaaatattatttaagtaatattaaattatttaaagttgtaaactttaatgcagagaacataattttcatgtgcttttgtcagtctttaaatgtatgcacaaatctaatgctattgcaattgaatatacatttttaagaaactgagggccaggtgcggtggttcacgcctgtaatcccagcacttggggaggccaaggtgggtggatcacctgagccaaggagttcaaggccagcctgggcaacacggtgaaaccctatctctactaaaatacaaaaaaattagccaagcttggtggcatgtggctgtaatcccagctacttgggaggctgagacaggagaatcacttgaacctgggagggggaggttgcggtgggccgagatcacgccattgcactccagcctgtccagcaacagagcgagactccatctcaaataaaacaaaacaaaacaaaggaaaaaagaaactgataacttttatttattttacttagttataaatataaatatatacatatatacatacatgtgtatatatatatatatatatatatatgtatatatagtcggccctccatgtccatgggttccacattcatggattcaactgtgaatggaaaatatttggaaaaaattgcatctgtaaccgggcactgtggctcacgcctctaatcctagcactttgggaggccgaggcgggcagatcacgaggtcgggagatcgagactatcctggttaacatggtgaaaccctgtctctactaaaaatacaaaaaaattagctgggcgtggtggcaggtgcctgtagtcccagctactcaggaggctgaggcagaagaatggcatgaacctgggaggcagagcttgcagtgagctgagatcgcaccactgccctccagcctgggagacagagcgagaatccctatcaaaaaaaaaaaaaattgcatctgtattaaacatgtaagactttttcttgtcattattctctaaacaatacagtataagtactcttcatatagcatttacattgtagtaggtattataggtaatctagggatgatttaaagcatatgggaggatgtacataggttatatgcaaatactataccattttatatcaggcacttgaacatctgcagattttggtatccacaggaggtctagcaaccaatcccccacagatattgagggataaatgtatataatttatttatgtattgtaaaattttgtagaagaaaaagtgtgtaaggcttgccaacacattttggaaaagaatagtgaaaagagatttgcccagatatttcagcatacactaaagctactataataaaaataatgtggtacttgcagagaaagacaagcaaattattggaaaagagtagaatctagaaacagactcaagtatatatacacgtcagtttaagatttaataatgatgtcatttcaaatcaatgagataaccatgtatcattaagaaattatattaggatatcaatgttttttagaaaaaaattcttagatttcctctcctaatgtatacaaaaatagagataaactaaagacctagatataaaatgtaaacctataaaaagtttagaagaaattttgaagcaaaagaaaattttatttaactacataaaaattcaaaacttttatatgtcaaaacatattatattaattaaaaatttttatcattaaaaggcaaacaataaaatgtgcgaatatatttgtaacacatatagaaaacaaaaaatagctttatcacacaaagagcttctataaattaatataaatatttttaaaagaaaggaaagacaaacaagactaggtaaaatccagaaacaagcaatccttcaaagaaatacaatgaccaataaatatgtggataatttttaccttcacctcaacataaaaacagtctgtattagtccattttgcattgctataaaggaatacctgaggctcggtaatttattttaaaaagaggtttatttgactcaaagttctgcttggtgccagcatctgtttggcttctggtgaagtctcaggaagcttttactcatggaagaagatgaagtgggtgcaggtgtgtcacatggtgagcgaaggagaaagagagagagatgccaggttcttttaagcaatcagctctcatatgaactaatagagtgaggacacattaccgtagggagggcaccaagccattcatgagggatctgcccactaggcctcatctccaacattggggatcaaattccaacatgaaatttggagggtacaaatatccaaactatatcattctgcccttggccccccaaatctcatgtccttctcacattgtaaaatacaataatcccttgccaatagtcccccaaagtcttaactcgttctagaattaactcaaaagttcaaagtccaaagtctcttctgagactcaaggcaagttctttctttctttaccacatggccaggctgtgaatttttcaaacttttatactctgcttttcttttaattataagttctaattcaaagtcattcctttactcccatatctgatcatagattgttagaagtaagcatgccacttcttaaatgctttgctccttagaaatttcttccaccagattccctaggtcatcactcttaagttcaaccttccataaatccctagggtatgggcacaatgctggcaagttctttgctaggatgtaacgagggtaacctttgctccagttcccaagaagttcctcatttctgagacctcatcagcctggcctttactgtgcatatctctatcgacattttgctcaataccacttaaccagtctctaagaaattccaaactttcccttgtccacttgtcttcttctaggctctccaaagtcttctaatctctgcacattacccagttcccaaagccaattccacattttcaggtatctttatagcaccactcattcttggtatcaattttctgtattagtccattttgcattgctataaaggcatacctgaggctgggtaatttatgaagaaaataggtttatttggctcacgattgtggatggtgctagcatcttcttggcttctggtgaggtctcaagaagctttaactcatggcagaaggcaaaagggaagcaggcatgtcacatggtgagagggagaaagagataaatgctaagctttttgaagcaaccagctctcatgtgaactcataaagtgagaactcactcattaccatggggagggcatagagtcattcctgagggctctgcccacacaacccaaacaccttccaccaggccccacctccaacaatggggattacatttcagcatgagatttggaggggacaaatacccaaactgtatcacaacccaaattaaagtatccaggtatactttttcccttatcaaattgctttaaaacctgcaatatcctgtgctggtgagaatgaggagaagtgagaactttcatacacttttgctggaattgcatatataaattttgacacagaaatttcatatctagaaacttatcccatggaaataacagcacgacgtttttattatttaatttcatctcaggagcatttccccatactagtaaatagtttttaaaacaattattatttttttctaccaattgtgtatttcttctttccatggtgatgacataatttctttaagtattttcctattattgggcatttgtgtcattttgaatattctgcttttaggtttaagagacatataaccaaatcagataatgagtattgtttagatcctgattgaaacaaatagtacaaaggcattttcaagattacctggaaattttgaatatttaaagggtgttcaatgatacaaaattagtattaatttgttttgtgttatattggctttcttggattggtgtcacatcgatctctctactctttgcttggagaattcaattgtttacctctatatcctgcattttcaagaatgataagaagaagaagtcacattttgattgtccctttccaagggagggaaaccccagggatctaaagccctatttagctccttggggaacgggaagggatggggggatacattctttaaaattctttcttattctgttaagccagtaagaaattaggattgcttatttgttaacctggtctccttgctacagtttttgggagacatgtttgccaataatttaagttctaaaataatgcccttaaatgaacaaaaaaattgtgtttattaaatacaaaccaactagtgaacaattgaggcttaggtgagaattgggtcaatggaatgagaagtatattttttctcatttcttttagtgtgaaaataaggtcattctttgcattataaatagtacatgtttattataggtaatatcaataatgtccgtactatcactattcaaagatactaatattttagtgtcttttcatcctgtctttttccaggtgtagttattattcaatttataatttggcatcctaccatatatataatttaacatctactcttttaacgtaagtatttcttaatattatcataaattcttgtataacattctttttaatgactccataatattctaccaagtatatatatattactacatataatagtattacatatataatagtttaactatcttactattatcagaaaaataatatatttactataaaactttttttaatactttaagtgttagggtacatgtgcacaacgtgcaggttagttacatatgtatacatgtgccatgttggtgtgctgcacccattaactcgtcatttaacattaggtatatcgtctcatgctatccctccccccctccccccactccacaacaggccctggtgtgtgatgttccccttcctgtgtccatgtgttctcattgttcaattcccacctatgagtgagaacatgtggtgtttggttttttgtccttgccatagtttgctgagaatgatggtttccagcttcatccatgtccctacacaggacatgaactcatccttttttatggctgcatagtattccatggtgtatatatgccacattttcttaatccagtctaacattgttggacatttggcatggttccaagtctttgctattgtgaatagcaccacaataaacatacatgtgcatgtgtctttatagcagcatgatttataatcctttgggtatatacccagtaatgggattgctgggtcaaatggtatttctagtcctagatccctgaggaatcgccacactgacttccacaatggttgaactagtttacagtcccaccaacagtgtaaaagtgttcctattttccacatcctctccagcacctgttgtttcctgactttttaatgatcgccattctaactggtgtgagatggtatctcactgtggttttgatttgcatttctctgatggccagtgatgatgaacattttttcatgtgtctttgggctgcgtaaaagtcttcttttgagaagtgtctgttcatatccttcgtccactttttgatggggttgtttgtttttttcttgtaaatttgtttgagttcattgtagattctggatattagccctttgtcagatgagtagattgcaaaaattttctcccattctgtaggttgcctattcactctgatggtagtttcttttgctgtgcagaagctctttagtttaattagatcccatttgtcaattttggcttttgctgccattgcttttggtgttttagacatgaagtccttgcccatgtctatgtcctgaatggtattgcctaggttttcttctagggcttttatggttttatgtctaacatttaagtctttaatccatcttgaattaatttttgtataaagtgtaaggaagggatccagtttcagctttctacatatggctggccagttttcccagcaccatttattaaatagggaatcatatccccatttcttgcttttgtcaggtttgtcaaagatcagatggttgtagatatgtggcattatttccgagggctctgttctgttccattggtctagatctctgttttggtaccagtaccatgctgttttggttactgtatccttgtagtatagtttgaagtcaggtatcgtgatgcctccagctttgttcttttggcttaggattgacttggcaatgcgggctcttttttggttccatatgaactttaaagtagctttttccaattctgtgaagaaagtcattggtagcttgatggggatggcattgaatctataaattaccttgggcagtatggccattttcacgatattgattcttcctacccatgagcatggaaggttcttccatttgtttgtatcctgttttatttcattgagcagtgatttgttgttctccttgaagaggtccttcacatcccttgtaagttggattcctaggtattttattctctttgaagcaattgtgaatgggagttcactcatgatttggctctctgtttgtctgttattggtgtataagaatgcttgtgatttttgcacattgattttgtatcctgagactttgctgaagttgcttatcagcttaaggagattttgggctgagatgatggggttttctagatatacaatcacgtcatctgcaaacaaggacaatttgacttcctcttttcctaattgaataccctttatttccttctcctgcctgattgccctggccagaacttccaacactatgttgaataggagtggtgagagagggcatccctgtcttgtgccagttttcaaagggtatgcttccagtttttgcccattcagtatgatattggctgtgggtttgtcatagatagctctttttattttgagatatgtcccatcaatacctaatttattgagagtttttagcatgaagagttgttgaattttgtcaaaggccttttctgcatctgttgagataatcatatggtttttgtctttggttctgtttatatgctggattacgtttattgatttgcatatattgaaccagccttgcatcccagtgatgaagcccacttgatcatggtggataagctttttgatgtgctgctggattcgttttgccagtattttattgaggatttttgcattgatgttcatcaggtatattggtctaaaattctctttttttttgttgtgtctctaccaggctttggtatcaggatgatgctggcctcatgaaattagggaggattccctctttttctattgattggcatagtttcagaaggaatggtaccagctcctccttgtacctctggtagaattcggctgcgaatccatctggtcctgcactttttttggttggtaagctattaattattgcctcaatttcagatcctgttattggtctattcagagattcaacttcttcctggtttagtcttgggagggtgtatgtgtcgaggaatttatccatttcttctagattttctagtttattttcatagaggtgtttatagtattctctgatggtagtttgtatttctgtgggatcagtggtgatatctttatcattttttattgtgtctatttgattcttctctcttttcttctttattagtcttgctagcggtctatcaattttgttgatcttttcaaaaaaccagctcctggattcattgattttttgaagggttgtttgtgtctctatttccttcagttctgctctgatcttagttatttcttgccttctgctagcttttgaatgcgtttgctcttgcttctctagttcttttaattgtgatgttagggtgtcaattttagatctttcctgctttctcttgtgggcatttagtgctataaatttccctctacacactgctttgaatgtgtcccagagattctggtatgttgtgtctttgttctcgttggtttcaaagaacatctttatttctgccttcatttcattatgtacctagtagtcattcaggagcaggttgttcagtttccatgtagttgagcggttttgagtgagtttgttaatcctgagttctagtttgattgcactgtggtctgagagatagtttgttataatttctgttcttttacatttgctgaggagtgctttacttccaactatgtggtcaattttggaataagtgcgatgtggtgctgagaaggatgtacattctggtgatttggggtggagagttctgtagatgtctattaggtctgcttggtgcagagctgagttcaactcctggatatccttgttaactttctgtcttgttgatccttctaatgttgacagtggggtgttaaagtctcccattattattgtgtaggagtctaagtctctttctaggtctctaaggacttgctttatgaatccgggtgctcctgtattgggtgcatatatatttaggatagttagctcttcttgttgaattgatccctttaccattatataatggccttctttgtctcttttgatctttgttggtttaaagtctgttttaccagagactaggattgcaacccctgccttgttttgttttccatttgcttggtagctcttcctccatccctttattttgagcctatgtgtgtctctgcacgtgagatgggtttcctgaatacagcacactgatgggtcttgactatccaatttgccagtctgtgtcttttaattggagcattcagcccttttacatttaaggttaatattattatatgtgaatttgatcctgtcattatgatgttagctggttattttgctcgttagttgatgcagtttcttcctagcctcgatggtctttacaatttggcatgtttttgcagtggctcgtaccagctgttcctttccatgtttagtgcttccttcaggagctcttttagggcaggcctggtggtgacaaaatctctcagcatttgcttgtctgtaaaggattttatttctccttcacttatgaagcttagtttggctggatatgaaattctgggttgaaaattcttttctttaagaatgttgaatattggcccccactctcatctggcttatagagtttctgccgagagatcagctgttactctgatgggcttccctttgtgggtaacccaacctttctctctggctgcccttaacattttttccttcatttcaactttggtgaatctgacagttatgtgtcttggagttgctcttctcgaggagtatctttgtggcgttctctgtatttcctgaatttgaatgttggcctgccttgctagattggggaagttctcctggataatatcctgcagagtgttttccaacttggttccattctccccgtcactttcaggtacaccaatcagacgtagatttggtcttttcacatagtcccatatttcttggaggctttgttcttttctttttattcttttttctctaaacttctcttcttgcttcatttcattcatttgatcttccatcactgataccctttcttccagttgatcaaatcggctactgaggcttgtgcattcatcacgcagttctcgtgccttggttttcagctccatcaggtcctttaaggacttctctgcattggttcttctagttagccattcgtctaatttttttttcaaggtttttaacttctttgccgtgggttggaacttcatcctttagcttggagtagtttgatcgtctgaagccttcttctctcaacttgtcaaagtcattctccgtccagctttgttctgttgctggtgaggagctgcgttcctttggaggaggagaggtgctctgatttttagagtttccagtttttctgctctgttttttccccatcttcatggttttatctacctttggtctttgatgatggtgacgtacagatggggttttggtgtggatgtcctttctgtttgttagttttccttctaagagtcaggaccctcagctgaaggtctgttggagtttgctggaggtccacttgagaccctgtttgcctgagtatcagcagcagaggctacagaacagtggatattggtgagcagcaaatgtttctgcctgatcgttcctctggaagttttgtctcaggggagtacccggccatgtgaggtgtcagtctgcccctactggggggtgcctcccagttaggctacttgggggtcagggacccacttgaggaggcagtctgtccgttctcagatctcaagctgcctgctgggagaaccactactctcttcaaagctgtcagacagggacatttaagtctgcagaggtttctgctgccttttgttcagctatgccctgcccccagaggtgaggtctacagaggcaggcaggcctccttgagctgcggtgggctccacctagttcgagcttcccggttgctttgtttacctactcaagcctcagcaatggtgggcgcccctcccccagcctcactgccaccttgcagtttgatctcagaccgctgtgctagcatgagcgaggctctgtgggcgtaggatcctccgagccaggcacaggatataatctcctggtgtgccatttgctaagaccattggaaaagcacagtattagggtgggagtgacccaattttccaggtgccatctgtcacccctttctttgactaggaaagggaattccctgaccccttgtgcttcccggttgaggcgatgccttgccctgctttggctcacactgggtgcactgcacccactgtcctgcacccactttccagcactcgccagtgagatgagcccagtacctcagttggaaatgcagaaatcacctgtcttctgcatcgctcacgctgggagctctagactggagctgttcctatttggccatcttcactataaaaccttttgaatacaagttttatttttcttatttcagatttcttatttcttatttccttagcaaagtccaaatccttttttttttttttttgatacagggtctcactgttgcccaggctggaatgcaatagagcagtcatggctcactgtagccttgacctcttgggctcaagcaatcctcccacacagcctgctgagtagctgggaccacaagtgtgtgccattatgcctggctaatttttaaacatattttcagagatgaggtctccctatgtttccctggctggtctcaagctcctgagctcaagccatctttcctcttcagccccccaaattgttgggattacaggccttaaccaccttgcccaactcagttttcaatatttgctaaccacttgtattgtctcttgaggactatatgttcatatcatttacatatgtatttatcttttggatcctacagctttatttaaatattaattatgtgacttagtttctgtgactatttttttcccatttgttgagtaatttttaagattgtttagtctcttatgaatggagtaattttttatttttatatacaaaatctataaatcttctagtttgtgatttctccaacttgattttaaaatgttagattcaatgacatagaaaaaattccttgagcacaaagctgatttctagaccttagagtaggagcctacaagggttttccctctcttttatcaagttgagagagaagggaagatgacacatgggactggtatgagggcctttaaaatcagagcaaccaatgccagagagattgatggtattcttgaagggagtgggaggaggcaattagaacacttaggttaattgcactggatggataaggaatggcaaagtggagtggcccagccatggcattccacctagttaggctgcaaatgatcacacctgagctactctgctgtgtctcttcttccctactcagggaaatctccagccctctctggttcccacccccagctctgtagtattactatagtgtctgtaacatcagctgtagctgggcataaaatgatgcaacaccagcctgtctctgcttctcatgggttcaggaagtggtctttcatttatcatcgaccacttagtaccagccacctaccgtgagaagcaaaacagacaagaaggaaagaaatgggcagattggggatatattttgagggtatacttgagaggatttgttgaaggattggaggtagtgtatgagaaagatgaacaaggatgttctcaagaccggagcaagaagttgccatatcctgagatgagataagtagcaggagaagaaagtttcaagggtggtaatcaggagatcaatttctgcacacattaggtttgataggccttgcgatgtccaaatggagatacatgggcctgaagggagattatggggctggagttcagaagggagatccagggtggagatttgtcaacaaataggtggatgacagcatccaggagacagagtgactagaaaagtaaagaggatggaagaatgagtgctgggactttccactggcacataatttagagggcgaaaagacgagaataaaccagcaaaggtgacgggggagcagcaaccagtgaggtaaggggaaagccaggagagtgtggtggtatcctggaagccaagggaagaaagtttatcaagcaggaaagagtgatctgctgggttaaatgccgcttaatggtaaatattgagtgtcaacttgataggattgaaggatgcaaagtattgttcctgggtgtgtctgtggggatgttgccaaaggagattaacatttgagtcagtggactgggaggcacagaccccaccatcagtcttggtgggcacaatctaatcagctgccagcacagctaggataaaagcaggcagaagaatgtggaaggactagactggctgagtcttctggtctccatctttctcttgtgctgaatgcttcctgccctcaaacatcagactccaagttcttggactcttggacttacaccagtggtttgccaggggctcttgggcctttggccacagactgaaggctacactgtcagctttcctgcttttgaggttttgggactcagactggcttcctggcttcttagcttgcagatggcctattgtgagacttaaccttgtgatcatgtgagtcagttctcctaacaaactccccttcatacattcatctgtccaattagttctgtccctttagagaacattgactaatacagtgtgacaggtcaagcaagtgataggctgagaattgacctctagatagagcaaattattggagactttgataagagcagtgtcagttgagtggtgaaggcaaaaccctgagacatgggttcaaaagaggatggaaggaggagaaattggggctgtacagaactggggcataaaaatggcctatatctgaaaataactccaaaaatttattattaaaattaatttcatttgtttctttttaaatttttttcatgtggctactagaaaaattaaaatgacagatgtggctcacattatatggctactggacagcactgatataaattatgcttttcatagttttatcataaaggggaccagaagatgggatggtagctggtggtgaagtggggtaaagagaaacttttttcccctgaaatgggagaattgcagcatgtttgtatgtgggaataatatagtcaaaagtagaagttgatgatgcagcagaagagacaggggacaaatgatgtcctggagtaggtgagtgcatttgggttccagcgcataggtggagggtggccgaagggttatggactgttcatacagagtgacaggagaggaagcagaatgtgaggtttgcaaacaaaggtgagtatttatggacatgggagtgcttggaagttcctcttttgtaatcttagtgacatagggagccagtcttcagctgagaaaagaggatgggggaggaggttctcttctgacatacactatagaccacagaatttggaaaaaaaaaaaaaaagcttgctactaggtcacttagaagacaaggaggggacaatgtagggtgtagggtacttcggatttgctggtggttcattaccggaaacaaaaaatgaaacaacccattggagacatgttcccactcggtcatcttgtctccttcgtttcttggatcccagtttttttgtctgtctgtttatttgtttgttttatcaaagcagaaaataaaaactccaattctctcctcctcagtttgcttggtgttcaacatagttcctcctgctgcgggccagcttggtttctttaaactttaattgccacaaaaacgtttgcactcagagccctaaatcttccaagtcctccttttgtgtttcttgttttcctcctctttttctgccttcaggaaagaagtgagatgatgatggctctgtctcagcagctctcggggggacctgcaggctggggaggcagcttctctctgcaatttggccgctcctggacttgttgcagccaggcttcaaagagaaaccaccgcttcctccccgagccccacgccagcctcagaggcagctgggcctattgaaacattcaagtttcacttcaggctactttaaacatttgctttattccaaaacagctaaacttggagttattttcaaatataggccatttttatgccccagtatattgtgtggttttgaaggcttttttcatatcattagctgcaacccccaaaggttaaaaataatgattaagtaaaatctttacacggattcctctgctccctggaggggacactgggcagtgtccaaactgccagacaagccaagctgtgacaatagtgacttagcttgcgactcttagggttgtccaaatgattatattcttgtggggaggaacgtgaaagggggctgaagagaacagtgtaagacacaaatttggtttggggtttggcgaggatcaagatttttaaaatggctcgtgtgctgaattcattttttttttcttgctgtcttagagtaacaatcacataaacatactctgagtttattttctgtgaaatagttgcagttcacctttcagctgataagcatctgcccctagaaaaccataaaaaatggaagagtttacaagaggttgtgagttggcacaaccaggcaggggaggagaaagcacttaggacaagtaaatattttacagcacctatattttcagactgtcgctgcttccaaggccagcctcctctcgctcctggctcactgctcctttcccttacttttcctggggcttgctttctttctgtcttcttatttttttaatctcaaagttaatatttccatttaattctacctgcttcctccagtagttaacatgctagttagctatttaaacattttatagatttctctgagcttgtcataattattttcttggctgagccttctggagtcattccatgtcaggagacagtctgaaatagaaagacagcaactttagggtgggtgcagctgggttacacctgttgctaaacaaaacaggatttatgaaaacataaactaaaacaagtaaagcaaatcagaaaaaaaagacagtaagcagcctgccctggtaaattgcatgcttcttttactgttgtcctctttgtgtgagagatttgtttgggttttggaagggacacttcaatgcacaacctctgtaatcctcaataaattcagttagggtgaagcaaatcataccaagaggaggctcctaagtcaaacagaatgattttttttttggcgctaaggggtgtttgaattttgacagcttgttctacattttaacaatggaagctatgatggaacaaaacatatttctagacattgttgctttttatttttagtgtagggttaagtgttagtgttaaacattttttgaaaataaataaattttctcaatttttataatgctgaaaaattaatgaccatatggtaaaatactctgactgtgggtggaatgcaaggcatcgaaggacattacctaatggaggtgggcgtagttttccttgactccataaaggattttaaaatccaactgggcttaatgttccatctaaatctgcattccatggcatcatgtcggttcaccataaaaattagagaaagtttctattgatcaagaaagaagaaagaaagagagaaagaaagagaaagaaagaaaaaagaaaaggaagaaagaaaagggaagaaagaaagaaagaaaagagagaaagaaaggaagaaagaaagaaggaaagaaagaaagaaaagaaagggaggaagggaggaaggaaggagagagaaaagagacataattgctctattgtgaagattaatcaactttataaaggaataaaaatatttcatagggacgtggtaaagattcttttgtgagggtttcccactttctgctggagtgtatagaccacttaaggtagtcacatcaggaaagggtgagaactttgcccttggacaacaagaagattttctttgcatttttttcaagaggcccagtttttcaagggcctatgacaaaagtctggaggtaatgagaaaagatgcagacgtgatgattagaaagctggttctcagtgtttgtttagtgaatattagattgagcttttccagcgtttaactcttgcagttaagagttaagagtggtaaggggagcactgagtgctgattcaaaggccagatagcattttgcagctgtggggctacgcactgggccctggccaatgcacctcatccctgcttttgctggattttaacaggcaccacaggacccttggctgcttaggcagccaactttgctaaattgcttcatggtttccatgatgtgagctgaagtccaccacagctaggttggcatctttgcattcatttccttcatgtcccattgtaagttaagtcataaactggtacttcagacagtaaaaagatggttccttgccatgcatactttgatcttactctggtgggaatcattcccttgccttataactggcatctgaactgatgataccaactttgtaaatgttttaaatttttgtggtaaaaaacacataacataaaatttaccatcttaaccatttctaagtgtacagttcagtagtgttaagtatgttcatattgttgtgcagccaatctccaaaactttttcatcttgcaaatctaaaactatatacctcttaaactacaattctccattctccccttccccaagccctggcaactacctttttatgttctgtttctgtgaatttgaccactctagataacttttaagtggaattatacagtatttttctttttgtaactggtttatttcactttgcataatgtcatcaagattcatccatgttgtagcatgtgtcagaatttccttcctttgaaagcctggacaatattccattgtatggataggccacatgttgttcattcattccttgagggatacttggttgcttctacatccaactctatattttagtattcaacataatctgaggggtgatattgttctattaatatttctataactatttgtcccatgacctcaattgttaataactgttgatatgaggcatctttgccctcccaaaatccctttactaatgttaagacagagtatcaaacttgaaataaggcagtagaatagcctcagttttcacggtcttgtaagagcattttctaaaagacctacccaaagatgacctgattctctaggggaatgtatcttatttgacatattatttgttactaattaaggctcagactctatgagatgacatgctaatttgtaggattttattcagtagtgatgcaagtgattttggtctggtaaaaaaaaaaaaggatgactttaaaggttatacttttattgccaagtatagtattaactagtgttctgtctaacccagcaatcttattccaacattcattctcagatgcccgcatatatttagtttctcaaatactctttgcactggttttatcattctgctcgttacctcattaatgaattacgtaaatatttgccacatgcttatgtttatatgcaagccatagttataactttaaaaaattatgttttgaatttctttcctgccagagcagccagcataaataactgcattcttcatttcagtgaagtttttgttgctaagccatagaggggccaggtgatgtcagaacagttaagcatgagacctacactaggaaaaagtaggaaatggctttctgctaaatgtaattatagaataagttctttttttttttgaaagaagactgaccaacaacacaacaacaaatttagcttataaatatgttccagcattttaatctaatacaagggcaaagtaaacctctgtgttgatgtttgggccgaaaactaccagcctcctcaactcaactatgcaaacatcaggccaggaggctgcagagacctcaaggtgtgtttcccaaaaggcatagtagagaggctagctacactcacatagatctgcagttgcaacagaggatataaaaaaataaataaaaggcaaagtttccataaactctgcattttcatacccacctgcagccaaaccttcttaatgtggagatgtgcctgtttcttgcaaagggtttactattatggttctgctctgtgctggaaaagtgcaaatgactatggacagcatgccaaaaaacagtccctgctgattcttttcaactcaggggcatgtgtgtgtgcacatttgtgtgtgtgtgtgtgcatgcctgtctgtgtggggggtgttactataccatacagacacacagcctgccgttttaagtgtcccagagatcaatttattcaacatttagtgacgagaggtagctcatttaaagggttagtccctaaagattaggaactgattctcaagaatggaggtaatatatcttggttgccttctaattcccaggtattcctcaaagacagaccagcataaattaatcaatgcctctctgaattctgcaaaatttgttttttcttttgtcccacgtgagagtgaatgttaagataaatggttatttctggactaaaattaaaggaagttgagaaaagcaaatgatgtatttcagtgagttagtagaaggccagagggaattctgttaaaagcctcccctacagcttaatgattgtcacattgcaaactctaccttgataaaaagaaaaattttaaactatgacctcccttaattttctccatctatgtgtgggagctctcctctgtgagttcatctgtttgaatttgactctgaatgattcaatcagccagtgttgcaccataatttggtagccctttggctaaatgcaaagggttggtggtctcaccctgggtatatgcagacatctccctggcattgttacattaccctgtggagtcaggggatgacagatgaagaaaatttctctgctgaagttagtgaggccccctccatttctaggaaatccttaattttgttcttacaatttaacgaatctctgcttttcatgcaatctttgtatttagggtcattccagtcttttaaacaaaattggtatacagctttttatgtggggtagtgttttcaattttcacactgatgctatcatatttcaggaataaccacaagtggttaattctgtaattcttctagacattttattttaaactttaaacctgaggaaaccatggtcagtatcaataaatgttgattgagtgtcaactgggtatgagccctgtccctggcactttaacaagtctgctctgagaggtctgggtttccaagatgttccattacctggtttaggagtcagatatttccctcaaagaggtattccttgtttcctgagttttaaaattattctaagttcccagtttttaaagccattatctgtaagacaggagtgcccagtagttttcatttactaggagcttattgtgagctagaaactgtagttagtcaagtgttttacatgcatttttaaattttaatctccataccaatctactaaattggcgccctattcttctgaatcccgttttagaggtgagagcactgaggcttgctgagaacatgccatcagctccagtgacacagccagcatggaatccagtttaaatgtgggcatgtctgactccacagcctctctgctacatcatgtgcagtctgctttttgatggccttttgttaattcctccttggtgccctgatatttcagaagttatatgtcatttagttacacattttaaaccttaggaaaccaagtctgcatcaacatttactaagtattgactggctctgcatttaatgttttacacgtccgttttgcatggtcaggatgtccaaattatttcattagctcattattttggtcatatgtatttctgaaggggactataataatgaaaactagcttaaattcccaattattcaggctatttcatttaaagatgagaacagctggcagtttcaattcctcaagtgttgaaaaattgtggaaaagaaaaaccccaaaccagcgtgttaacaaatggcttagcgaatgaatcggagggattgtgttctctctggccgtttctggatatcttctgtgtgtctccacaatctgggtgcggtgtgatgtgttgctccacggagaaaccacagttgaaagaataaacagggatgacagaataaacagaataaaccctgagtgtgggggaagctttgcaagtcaggctcctttcactcacatgcctggccttctgggaatgggcccaaagttttctctttgggaactggtgtaaacggcttattgcagccagtttgtttggtttctcattgactggtacagggtcctgggcaggcactagcagaatgaggctgcctttgggggagcctcgcaaactgggcactgctcagtaaacaaacacatgcacaaatgtgctgaggaaagtggggacccggcatggcacacacgcatgaacacacacacagactgagggagatgatctaatggagaagaaaagaatttattgttgttgatcattatggattccacctccaattcaatgacacatttttctgaaaagatttccattcttttgtttttgttttatttttagttttagttctgggtatgtgtacaggatgtgcaggtttgttacataggtaaacatgtgccatggtgatttcctgcacctatcaacccatcacctaggtattaagcccagcatgcattagctatttgtcctaatgctccccctccccaaccacatctgccaacaggccccagtgtatgttgttcccttccttgtgtccatgtgttctcattgttcagctcccacttacaagtgagaacatgcagtgtttgattttctattcctgcattagtttgctgaggataatggcttccagcttcatctgtgtccctgcaaagaacatgatctgtgtccttttaatggctgcataggattccatggtgtatatgtaccacattttctttatccagtgtatcactgatgggcatttgaattgattccatgtctttgctattgtgaaaagtgcagcaatgaacgtatgtgtgcatgtatctttgtaataaaatgatttatattcctttgggtatatacccagtaatgggattgctgggtcaaatggtatttctggttctagatctttgaagaatcgccacaccatcttccacaatggttaaagtaatttacattcccaccaatggtgtaaaagtgttcctaagatttccattttatgtttgtcaagcactctccttggaggaagactaaaggcacacactgtccataagaactgaacaatcagtgctgttaagtaagttgggttgagattgtgcaagaccaggaaattgaagaggcagttgatgaaagttgtgaaaggaaaattgcagaaaaaatcttgcatgcccatgatgggggcactcagcagtggaaacagcaaaaagagggacccattctacagcagaactgcctttttcaatagtgctattgggacctgggctcatgttcttgctgagaagagccactaatattacctgggagtgagttgagccttaaagtccttgtctgtgcagccctgtgttttgagcactttccagatggttcaagaagtttgtagaacttattcataatttgtgtagcaaaacagctgcattttggagccttgatagtagtatcacagagttgggctggaggagagtcaaagacagggacatatgtgtcacctgggctgctttggagatctcaggactgtgacaggacagtgacaccggcctgcaaccatagaccaccagtgtgcacttataacctgggctcagacagatatgctgactcccaagatggctgtatcttgagttaatggcacataattcagcccctcactgaggctttcctggaaatctaaccatggactgtatgtgcactcagtcctggaactccctgtctgaaagtgcaaaaatgcctgttctggtgtttgttcatttgcagtagttgcatgagcctctgtcctcagggtctctgtttccttcttcgtgtcctgtgtctccatactgcttctcttcaagtgccatctgtgagactcagggggatcctccgacatttacggtccttagcagtagggttttccctagtggtaaatgggagagaatcctgaattctagtcaccaggaagcagaagtacggctgagagacactgaaactcaaggtcaagtcttgcaggcaaggaagagaatagcaagttgagccctggctgattcagagtcctttatactattgagatgtacacattttttggattatatcacctgaaaaagcatgaggtttccactgtgacatttattttcttggccttgaaacccagaatattgagaatgtggctgttaaccaaagcctcctgaactgaaggaggtcttttcttgtatagtgtgtgaaagcagagaggagctgttcattgtagcctttgaagatcacctcttaatttccccgtgttcttattctctaacgatgtgcttcactcttctttggaggggagcctcctctgtgctgtttgagatcagtacttcctactgcctttatgatggccttagagaagttctcctgccggatctagatggatctcacattatgaaaggagcaacagaaccctgtaggaaggccagggctctatttatttacatttgaggtggtggctgtggaggaggaagattcaaaacacacaaagttatgtatgaattatgatgtgatatgttcagcttttagctctctactgggcagcacttcaaagtttgtttcaatggattttcttcagggggccacaccagcatcctccaaatgggagtctgaggatgcctcccatcttacatcactcacagatcactgccagagcaacaagaaacaaaaaccctaacaatttacagttcaccctctttgatgtaaggtgcagtggggacacgaagcccaggcctctgagtaggatgtagttggattggcacagaaagcaaactcttctttctttcctcaagaagaaggaaaactacactagcaaattaaaaatattagcaagcttctactcagatacatttagcttgatttgggtcaaggtgggggaagggaagagtaaggaattcaaacagcctgtgccaaggatttgctgaacatgttctttaaaaaaatgctgacaggcattaaattaagtaacaactgcagattacacaagggtaaacactgctgctaatgtttgactaaaagctaactgagggctctaagtgattccagttaatttatagatcacgccagtaacagccccaggggactggggctgctgaaggtgggagattcgttttatagccagaagccacgtttttaattttagaaaaagaaaactaaagctgtaggaactgatttagaaacttcagagggagagagagaaaaagagagggagagaggggagggaggaaagacagaaagagagagagaggtgtagggggaatgaattgaatgtctttgctgggcttgggatagaaaagtggctaagaaaaaaacagaaagaaacacatctaactttaaataactcttccaggaggagagagcatgctaggatcaagagttaactattcctatggggtaggggtcttaaattcaagactgtgccaggggctccatcgaccccaaatgaaagagtataaactgcctcgtgttatcaaataagattaatttaattttgcaacatttagcttcaagttaaaatttaaatatatggttgtacagtaaatgattttaaaattatagtccctccaacataacctctcttgacacaattttaaatgctttttaaatgggatgtgtagtttgtttagtacatagcagttgatgtccttagattgggttttcatcatgtattttaatttactaaggctgggatgaccataattgcctaacaattcaatgcaacggaatgggctacttcagcactttttactgcatttttccatataatatctaaaagtcaccctgcgacacacacaggctatgtttatgaaagcaaggctttaacccttgcatttttctaggtttgaataattttcttaataaggcaaaaaatgtttgcaaatttgcaccatgatgtcagcacgtcattgtgaaggaggtaggactggcctgcacttcagggatgaagtcctgtccatttggtgtttgcaaaccttgaggatcctcgtggaagcccagtaactccaaagacccttgtttcttcccaagtttctgtctcctttcaggcaagggcaaacatatctgctttgctaggccagtctttagtttaatcttagagtctcaaaaacaaacagtggtaaggtctggataacatagttatccatttctgcgtttgcccagatgaaactttaaaaatgctaaaaataccagggcaatttctgttaattgctctggattatcaggctggagaaatggattgggcgggtatattctagtctattaaatcttgtgctaactttactgatatcgtctcttggactctggcagcctattctgcttttcagcattctccagggatgctcccagcgtgttggaaaccaaactccctgtctgcagagacagccctaacaccaaaacttttgctttactagagaagccagaagagaaaaataatgctgttgcatcctctctgactcagttgactcactttatgacttttattgtcggatcccaaacttgatggctgacctgactgaggtcaccagccccatagggctattttaaaactttgaaaatcacaaggcattttcagttcttgccacttatgagtttgtgcaactattctgatgagtgatccttgaagatacattgcctcgaaatatgaaggtgtgccaagctctagcaaaactgaaaaaaaaagtgtcatttcagaatgaccagaatcagtagacattgtttattacccttatcctccacacctgatgttaaaaacaaagactaggagcacccatgcctgccaggtcagtttatttgtgaacattgaggaatgtctaaaggggattaagctttcatgtatggaaatgctttctaattcaaataacccactgtaattttttttaaagtgacatgaattgatgattgtagatactgtcatactgtatgaccaaataacatgattataatgatgtggcatttcctttccttgtctttaacaaaacatatggctttaggttacatttgtctggcttttggttcttctactttaacttgaaagatgaaatttatgcaatttctcaagatcccgagtcacaaagttgggtaatggcaaatggtatcctaataacaacaataataactggattttattgtgtagctattcagtgactgctctaaacaacaaccctagagggcaggtactattgttattccattgcaagtttaggaagtgaggcacagagagatgtcaggcatccacagtcacacagcagttgatgcaggagcgcagattcagccacactgcctgtttttatctagttttgggctctgccagcgagaggaaatgtcaccactcttcctttccaggatcaaactgcatatgtacactatattagctccaccggactctgtaatctaacttattttggcatggtagacccttcatgctagagtggaggaagagggactggatttattctccatcgtgcctgaagaatccatctcctcctacaatttagaacacacattttgttttttaagattggactattttattggaaaacagtggtagctacacttagcttactattaatacatgtcagaaatttttcaaagtactttccatttctttttcattttattctcacactatgaagtagacagtattatcatctccatgttatagatgggtatactgaaacacagatgagtcatgtcagttacttaaaattgtctagtcaaagggacacagagatgggctcacgtccaggtagccaggtcccatagtccatgctcttaatgctacgctatctttccaatgagttgataactagtcaggtgatttgagggttagcaataaaatgatttggactgagttctatcacagctgatggaattgcagaattggccattttatcattaacaagagcagtgctgcccccccgtttctgccattgtcatcgcagaacattccagaagaaaggtcctaggaggatctacagtggcttgtgttgttctcccagcatctcagactgtgatatctaactcttacttctcttttctataccttggttctcctgcctcagaataataagcccaataacaatagcctctttttatttgtggtgttttccagcgtacaaagcgatttctcacactaggtgatgtgaacctcactatggttctgtagggtgtattcagtcttcattgtattgataaggaaactgtagttcagaaacacccaaagccacaaaattggtcaaaacgggctggacttaaaacctggctttatagctggacgcggtggctcaagcctgttatcccagcactttgagaggccaaggtgggtggatcatgaggtcaggagattgagaccatcctggctaacatggtgaaaccccgtctctactaaaaatacaaaaaattagctgggcgtggtggcgggcacctgtagttccgcctacttgggagggtgaggcaggagaatggcgtgaacccgggaggcggagcttgcagtgagccgagatcgcgccactgcactccagcctgggccacagagcgaggctccatctcaaaaacaaaaacaaaaacaaacaaacaaaaaacaaaacaaaaaaaacccctggctttataatctcctatcccctatccctattcccaaatcctcctgcagtgagaaataacctcttgtagcagccatttcagtgggagtcaaaacacttcacaaaaccctctccttgttccttggaacaagtctctatgaagtggtccaagcagccaccagaagtggctggagagcacccacatatgctgcccacgctgtattttatgcctgaatttatttgccatgtagacatcttactgtagtggttgaggatattggaactacttagatgaaagaacacctaagcccctggtgggcttctgttaaactgtgtaggtccatagcacagataggggagcaatgacagtactctgtgaagaggagaaggtgtgcttacaatgaacggggccttggcgtccacctcttcccgatggagagaagtgttgctttttcctagagaaaagaaatgaacaagacctgttgatagtgaatgagttgggtccccatgctcccctttctctgccatgcccttcaggtgggatgctggcacagggaggattagatgtttgacctacttactcattccaacttatagctcacaaggatggagcttagctggaggctgaatgctggaaccccatcagagcatttcagaatagcctaggccatttccacaggtctgaatctgtgacctaggggcaggctcttagaacaacatattctcatataatgtgactggctggctgtaaggtgtccctaagaaaagctaacatcctctgctctaatcaggcagaaaggagtgagaggaggaagagagaggaacctggagaaaaaaaatgcaataaaggcctgtaaaaggaaaactcacaaagcccttctctgaagagcttttaagatggagtttaccagcaaggtactagcagacacatacgagcaggttaacatccctaaaataaagcaggagccagcaataacagggtcgggcaacagaaagctacagctggtaaggaagtcagcagcaccacaccattagatacagcaattactttagatacagggtggggtcccagctctgcagcacacactctcaggctggagaaacaggctgtgcttctgggaaagcattctccatcctggggtacagatccctggagtcttaagaaggcgttgcagaaaaattaagcattatctcgtctgagtcccctaggctgggttagaagttgcttgcctgattattgcgtgcagctggaatggtcttggtacagggagggatctgggctgaggaggatgggctgagaggggagaggggagagggaagaggggagaaggggacccgcacacatgcgcactgtagcagaagctgcaactttgccggttgcagggctgttgtgagatagggtgcttgctactgtgactggggccccgccttgcagatctgcttgtcatcacttaccctctcttggtggtttgggcatgcacttctttgggggaacaaacaaaattttaaaagttcctgagtttgacagcagcagccaatcactttcctccctattaccctcctctcttttttctaaagtagtcaaatgccagcttctatttcactagtttctatttctgtgaaaaacatttcagaactgctttcctcatccttcccactaaaaatcaagcatccccccccctccccgccctcctgttctgtgcaggaagggttggcccacactcacctgatgtgttccctcctcagtcgtggccagcaccaggtggttgctgccatcagatgatgttctgccctggcaagcacatgtttttaaatgactctgcagtacccaggcttataaaaacaaatgcacccagacgaagttccagcgccccgcggggatacactgaaattctctggccttgctgagctgggctttggcttcgagtctcctctcaggcagacctggatacgtcttcattcatgtgcctattttagtcattgcaaaatgctttataataattccagacgtgaaatgtgcacaggaggactctagtttggagcacaggctttggggtcagaacctcggcttgaattttgatgcaatgtatctgtataggtaagactttttcacctctgtgccacagttttcccatctacagcagcaacacctgtctgtgtagggttcttgtcagaattgaatgagataaatgtgatgtatttagcacagttcctggtacatagacaaacattagttcaataaagtttttctagtattatcatttccttgttttttccaaaaagtagttaatctgagcacacatctgtttataggaggaggtctgatggccgggaggacaggaagaaggaacccacaatgaagcaaaagttgcgtttaactctgtcctcaccattcctctcctggacctgtcctaaactggaagctgggggaggatggagtgctggaatgctgcagaagtctcatgggagggcgcctggtgttcaccacatgtgtacactgttgcacgaccaggttggcactttgcatgtgggaaacgatcagagaatggtgggggatgcttaagaggcatcactggaatcctacggtaccacagaccagagccttcccttcccttcctctcccacagatggaaatttgaatgctggggctcagtggaacacctgaaggaagctggtgaggcagatgtcccgctatgccttccaagtgtcatgcaaccagttcatgcctgtcagcatctctgccggtggactctgtgagtcagcaaatctacagagcagagagccacaagtggggacagatgtggtcaaatgccatttaaatcagtgattctcaacccaggagttgtcatggcactggccttgagtgagctggaccaagggaagtggtagaattccccatgaaggaccaagtgagcagatagaagtttctccattttaactttttctgagtcaatttaaaaaacacctagtgcctttttctgtacatagtgcctgtgggtttgaatttaagcctacccaaatgtgcttttatcccacctattttgaaccttgcatgtctccgggataagaattaacataagctataaatattcttccaggactaattattaaccgtgaatgttgagcggccttgacaaatataaaatgttatatataggcccaagagtagatcagagagttatctatctacttcaagttgagactcagagttttcattaaactctgcagtctcacagtatttccaatcatttcagggcagacgaaagttccgtggtatatctttttaatgtggcaggcctcgagggtggattgagttaggcaatttatccccttttatgccctatattcacatgcaacactccaatggggtaacataaaaccacagacaggtttctttacaccggtatttaagggaactaggaaagcagcccaaatcatgtggagaaagctggggaaagaagtatcagaggagaaagaggaccttagcagaaatgacaaaagtgaaaaaccttcctaactccttcagacatgatgcttaaaattgtgtttctttggcaacttataattttctgaagctggttctcagcctcagatcctcccccaaggtttttatgttgtattttgactcagtaggagggatccagtcccagaccttccggctctcaccagtacaccacaggctaacgccatccagcaatcagatgacaggaggaggagaggttcaaagaggactactgtatttctcagaaggggctggctcatctaccctccactgtattactcacactgtagatgcagaaaacatgtcaaagtatactggggctctgcaatgcatgcacccacacacatgtacacatacgcacagacttccaaactaaaaaggagaacagagctcaaaaggggacagtgtgcaactggtgctccatgttgtaaggacctcccctcctgcgggcgcggctaccccagcaggcttgtccgggcatgtccgcccagttgacgccaggccaagttttacgggaggaattggcctgtgtctaaagctggagttcagctttgctgactatggagactgatctgttggttgtcagcaaagaaaaggtggtttcaaaagagcagcagaggactctgtgctagttgctactggccagctttgactccgattggaagcttgaaaaacatagattggaagctatgcagaatatccagtgacagaaataaatcagagattgccaggggctgagggtgagaggaaggagattgacttcaaaggggcacagataatttctcagggtgtcggaaatattctgtcttgattgaggtggtgattactcgactgtatatgcttgtaaaaatttgtagaactgtgtgcctgaaaagggtgaattctactgtatgtaaattataactcgataaacctgatttttaaaaacactgtagtttgggaggccatataaaaccaaataacattttgagtcattaatg

SEQ ID NO: 156 - DNA, 33159 bp, Homo sapiens
  source 1..33159: mol_type = genomic DNA
actgtttgggatttaaccaccataactcttagggccctctgcctcagccttacccactggagcacctgagaatcagagaaaggaatagtaccccagcaggtgcccccaaaggttcatctgtgccaaacacatgaagaaggcagaaggctgagagtcaccattctacatagcaggatctcaggagcttcagttaggacttagggccaggaaaatatgactccctaaaagaactaaaattatttctcccttataataaagaagtaggtaattgacaatttccttttttgccatggctatcaggaagctcagagatcacatttaccctcacagttcatatacatttctccagttttcatctttggcatttagattcttattttcctaccctcattatttacaaagctgcctcagatctttcccatagagataggacataaaggctgggcgtagtggctcatgcctgtaatcttaacactgtgggaggccaagctgggcggatcacctgaggtcaggagttcgagaccagcctggccaacaaagcaaaaccccatctctactaaaaatacaaaaattagccaggagtggtggcaggcgcctgtaatcccagctattcgagaggctgaggcaggagaaccgtgtgaacccagcaggcagaggttgcagtgagccaagatcgcaccacagcactccagcctgagcgaaagagcgaaactctgtctcaaaaaaaaaaaaaaaagggtggggggggcgcataaagaaacctagcgtatattcacacagcagttcttatcagcagaactctgtaaagatcatttccaggccaggcgcggtggctcacgcctgtaatcccagcactttgggaggctgaggcgggtggataacaaggtcaggagttcaagaccagcctgaccaacatggtgaaaccccatctctactaaaaatacaaaattagccaggcatggtggcagtaatctgtaatcccagctactcagggggctgaggcaggagaatcacttgaaccagggtggcagagatcacagtgagccgagatcgagccactgcactccagcctgtgcgacagagcaagactctgtctcaaaaaaaaaaacaaaaaaacaaaaaaaatcatttccagatcctagctctgtccacaactccatgaacatgaatgaacgaagtttcctctctattttcctttaaggactgttgtgcttcccaacaggactgagacagcccggcagggatcagagctggactaagtctgcagggccccagacaagttccagcctcccctttctggcctgtcatgactttggacagagctccagaccttcccaggctcagtcttcaccaactcgggttccttgatttgccagttacctccctggcccattttccaggccactaacctctctggcttggagtgaagaaggatctgactctgctgcgcccatctccctccacacccaggtcccaaataaccaggccacacaccaagtttcaagtatctgtctcttcctttcactctctcaaaagaaaaaaataaataaattgcagaaggcggcagcatttccagtcttccctggctcccggacacccgacccccgacccctgccccccaccctccctcccgcatttcccactccctagacccatccctcccttttccccaaaaaaattcccaggaaaaaaaaaaaaaaaagccacatttagaccttccactcatgcaaaccggcaaagaaaaatggtgggggcatgtggaaggcaggggcccgctgcggagtcccctgcttctccccccaaaaaaccacctttgagaagaaaaaaagtggaaaaaataaatgagaaatcaaggaacatggggaattacgatgagggcaggggtgaccccagaccctgccttaggagagagcggaggcctgtggccctgcatccctgcagcgggtgctcctcgagggggccctgacttctggaatgtgtgtgggagaggatgggggagggcaggtggcccccggtgggtctgtgtgtgcattgggggcaggtgggggcggggatcctaaggagcaagggctcggaacaaggagcccagctcccccccagaccccaggttcctggcgttcaggagcccagttctggggtgcggggatacatgcagaggagtgtcccccctccaacaggctggatccagttagaaaggaaataaataagaaggggtgggagggaggccggggggagccaagggcttgggcaattcagtccagaccaagggcccaggtgatggaggcagggcgagtccaggccaagccagggcaggaatcagagtctctctcgggctggaacccagatgtaggggcctgagaggtcctcgatgacacgcttcaccttgtggtagatctcctcaaagctgtcaccctccacgatggctgggagtggggtggagcagggagtgaggccaaggaagggccagaggacacctggccaagggggttgcaccagcccagaggaaggggcacctctttccaactctccaagccataagtcctggggctgcacccgcccacaggggcacctcttttttttttttttttttttttttgagattgagttttgctcttagcgccaggctggagtgcagtggtgcgatctcggctcactgcaacctctgcctcccaggttcaagcgattctcctgcctcggcctaccgagtagctgggattacaggtgcccgccagtgctgggattacaggcgtgagccaccatgccgcgcccacaggggcacctctttctaagccatccactgggggtggcgggggagctctttctaatccgagcaagggcaccctacatgctggcaacagccttgctgtggcctcacctgagaagcactctgtgaactcctgctccagcttggtggctctgtcgaaggctttgcgggcttgctcctctgtgatccgcttgttaatctctctgtgaagagggagggagagcaggcctgagactggacccacctgaccctgccttttatctcctctatccaggaatgttaagtattcttctatttggagcacatagcaaaaaaaaaaatacaattcccaatatcctctggggccacagatgagaaccaccccccacccccctgccacccgcaaccgccccagccaggtgtggctactccagggacatctacggagcttcatccttccagccttcagccccagagatgggattcggactccaattcccaacagccctagaggccctgactcgccccagctggtatgccccaggggctgctgggaaatgtagtcctgtctagccaaggcaggagaggaggggaaagacccgattcccccacatcctctgggttccagggatccccctcaggggctgctgaaaccgctgtccagggttctgaagggagagttgaacgcagacgccttgtgaggcccagggccacaggtgttgggggagcaaaggggaggcccccaggaccatactcacagcacattctccagggagcgggggcggatgaagatggcgatggggtgcaggtgggccgcctgcagccgccgcacggcattggccgagacatcgaggatgcagtgcttcccctgggggcaggcagggtgggcggaggggggccagcgggtggcgagaaaggacagagagcagtgccggagggacacggacggggagaggtggggaatgggaagttggccgaaggggagtgacatggatgtcaagaaacacgggggcagagagtcaggcaggaagcgggtatggacagagtaaaagacagagggaaaggaaagggaagatggagagcacgggagagggcagggacaggacagaatggaggaagggaggagcaccaggcaggcagggacccaagagatggtggcagagccggggcagcagcgagtggggcggggtgtgcaaggcagaggtgacacaggcgggaaggaaagccaagaaaaaggagaaaggaagtaggatagagggaggagggaggggaggacggacagaggacagacagatggaaggaacaaggagacagatgggagggagtgaggcagatggagaaaggaaccgtggagggagggagggagggcagggtgaggagcagcggggaaaggaaaggagttagcagaggagtgggagaggggagccgggccccagaaaagggtgaggcaggggagagggccagcggggagtcaggaaaaagggagggacccagtggggaaggccaagccaccaaagacaaggccatgggaagagaggagaaatggggcaaggagaagggagtggggagagaaagaggccagatggtggtggggaatttggggtcaggaagtgagggaggtgggagagagagcaggggcagagagcaggcagtcagacagagttgcccaagaggagaaggaggtggaggagcggagtggagacccagcagggaaagagacagagagagagagagttagagaaagctggagggaggcagtggggtggggagaggggagaaggaagaggaccgggtgcccgccaggtcctacctgctctgccacctctcgcacggactggacgctggtcccatagaggtggctgttgtactggccggcctcaatgaacttgtgcgcctgaatgtccttctccattttctcccgggacgacacaaagtggtaatcccggccatctatctcatactcccgcttgggccgtgtcgtatctgccaggaagtcaccccaccccccaaagatctaaccaccatccctctagcttaaatcctgcctacttcaatcaaatccccatagtgcccagctggtcctttggtgaaagggagctgccagggagaccaagactgcagagggccagaaccgcttcccctagcaccctccagggcctccaagtctctggcctgggcatgggtactatggaatgagagggtggctgagaagcaccccttctcggagaaaccctgtatctccctacacaccgatcccccaggaggctctgcctatggccccagggatgggcctcccctgccccacccccacttccaccttctcctccatccaaggccccagcactcacggggaacacaggatccaaacttgtcggggaactcggagagaagatcatcgttggcgcggtccttggtgggcccaaggatgatgatggggcgagcatagtgcactgcagagagagcctggcttaggccgagcgcagggttgggggagcagcaagtgctggggccaaggcaggggccagggctcaccttccatctgcgtcactgtctcgtagctcagaaccgagtcttctcgacctggtgggaggtggggcatctgcaaggggctctgaaacaggggacctggagccctgtctcccccttgaggatatcaaaagcaactcagtgctcctctcacccacatcttcccgaactaaccctacctaccctgcgatccagagctggagccccagtcctaagaagaaaaagcaggccacggggttagttatgagctcagctccatgagccctcacacttccacccaggctcacaccctcctccacctaccttggcctttaaccttgaccactctcgtcgctcaaccctgtgggatacatggagggatacgcgggtaggggaatgcctaccccctgccacccccatgctctgagccagctgacaaccccttctccatactctgggccagctgacaccccttctcctgcagccctggacactgtgctcctcaataaggagttgtccttcccaaaggctcatgggagccacggaccccaggagggcccaacagacaaacccctaggagttcagagggcaaacccatcccctgttggctgcccaccccgggggaccttgggaacttcagtgcctgtggcaggaaggctacagagcccaggagcctcaccgccgtttgctggggatgaacccaatgtcgtcggtctcactgtcagagtggacccgccgtgcctgccaccactcctcatcactagcatcgatgacatgcagcacatccccaaagcggaagctcagggcctggctcaggaagccgcagtccttggtcttgtcgtaatcaaacagggccctggagggcaagtggctatcggtcagagcccagctgaggactccaggaaggatgccccagtcacccaaagacccggcccagaggtctgcagatggcactcccatgggagctatggatgccgaggaacccaaaactgtgtggggaccaaacgctgactataactcataacaactattagccatcactcagtccacactgagcacagtttccagaggcagggcttgaacttgaccctctcaagaaagcagtttgggccaggcgtggtggctcccacctggaatcccagctgactttgggaggccaaggcgggcggatcacaaggtcaggagattgagaccatggtgaaaccccgtctctactaaaaatacaaaatattagccgggcacggtggcgggtgcctgtattcccagcttctcgggaggctgaggcaggaaaatggcatgaacccaggaggcggagcttgcagtgagcagagatcacgccactgcactccagcctgggcaacggagcgagacaccgtctcaaaaaaaaaaaaaaagaaaaagaaaaagaaaaacagaaagcagtgtgcagtacacacgcacatcataaagtcacaggggtaaccctgaatctgcccaaattcataagaaaaagaaaatgtcccgtgtttccaaataatggttacccttaccagtatcaaatttctatcagtaagtcacaacccctggggtcagaaccagggaagtaatgaagacacagaagaaagcaatgggcctggagaggagggaggagaccccgggccccctggaagtgtgacaaccagatgacattccgcctgggagccactacacaacctctgtggtcactgggagtcagaacaaccttggggaccaaccggacccgagcagggaggaagggcagagcaagggctcaggtgggagccagtgtctgggtggctggtgatgccatccaacaagagggaaactgctggcacagcaagatggaacccaggcccacagcaggatgatgagctcagcgtgggacatgttgagtgtgggacgcctgtgggacatcccagtggagatggccagaaagccaatggccagaagtgcaggtcttgacctctggaaataggtcagccagggccagcacctccgagagacatctgcagagcgcagcggcagacgaggccatgcaagccacagggccagacagggacagaagtggaggggtgacccccgggggcgggagagaggtgtgttttggcagaaacctaagccacaaaaagagtcaatggagacgagccctaagaggggagcaaaatgccgctggagagacgggggcaggcaccacagagctgcggcccacgtctccgggactgcccacagggacgtgaaggctggggcaacactccaaataccctagaggaccctgcttcaccaagcattaaccttcgagacgccaaattgtggggtggcctgggagtcccggggaagtgctgggatgaccaggggctagaaggcaattgggatacttggggcagaggctattttcccatcgacagggagtatttcaaatgttaacctgtgcagccaagcccatgaaccctggctgcgcctcaggcctggggtggggagctagagcaggcagggtggagaagaggagcggctgaggcccgggccaggcacagagtgcccaggaacgcagaggggctgaggagtccagcccgggaagcctctgacctgatgtagaaaccccttttggggttgctccgcagggacgcagtccctgagcccaggctgctgttcatgagctgttcccgaaggtcgtggatcttggcctcgaatcggctgtactctgaggaaggacagggaggtttctgagctctgtccccatcctactgtcacccctgtcctcccctactgaagccatcagctgaggaagagttctaagggccatttcagctcacaagacaaggaacttccggcctggtaccttctggtttatactgagcgatgatcgtgaccgtctgacccgcattcttcagggcaatggcagcctgctcatggctggcatttcggaggtccacaccgttgacctagagagaggacgacaggctgtgtcaccagagacaggaggcagcacttctgggtccaggtggagcagggagtggtcccgcaagaggactcggctgcagcccatccaggcccctccccaagagctctgcgctctgccctgtggggagggggtggtgcaggtaggggcaggccttccctcaccgacaggatctggtcccccttccgcagctccccactgaggtctgcagggcccccggccaggataaaggagatgaagatgccttcaccgtcctcgccacccacgatgttgaagcccaggcccgtggagccccggtggatcacaattcgcctcggttctcggggaatgtcttcctccccgagcaggtccttggccactggagagtagcgccgaggggaagtgggggtcatggctgtggggtagtcggtgcccaggtagctgctgtgactgatctcattgtccaggtgctgggaataagctgaggaagacagggcagagatgaaagtgcctggagggaaacagcacccgccacccaaccttctccccagggtgccagaagagccaaagttaggtggaagggaagatattctgccagagatgccagggtggggtggtaaggggatatcagatcacagtgacatcaggggtcaggaatttataggtgacatcagaggctggttgtcctaggggataaaggatttgaacgttatatgtcctcagtatgccagggatggggaagtcaaagggagcattaatattacgctttgggggttttctctgggttcctgtgtcactcgaatctcttaatccataaaattcttctccctcttttttccccccacctctctgccatccattcgttgaaaaaactaggtcatttgtctaaaagaatttcccacattctatgagggaaattcttttgtttttttggggtttttttgagaaggagtctcaggctggagtgcagtgccgtgatcttggctcactgcagcctctgcctcccaggttcaagtgattctcatgcctcagcctcccaagtagctgggattacaggcgcgcgccaccatgcccagctaatttttgtatttttagtagagacagtgtttcaccatgttgtccaggctggtctggaacttctgaactcaaatgatccacccgcttatgcctcccaaagtgctgggattacaggcatgagccaccttgaccagcctatgagggaaattctaacagggaaattactgcttaccctcctgtggtttgtttagcctatgcctctgcccctgtatctcctgtaaactggcagttcattctggaggcttgatcagtttcaagttcaattcagagttttttttagtaactcctgtatacttcataggtagcgctacgttcttcctacagcatcaccacaggatgcaataatgcctggttgtctttctgtcaggtaagattaatggtaggttcagggtcatcagcccagtccatccattatctagcgccccatcagcctttcaggtaagttttagccacactgacaatcaccgcctggttctgataagtatcaaggactgcaaaatggtggtgattgtcatttactagtgggaattcttctgtaaaaaagaaaaatctcgaccaggcacgatggctcatgcctgtaatcccagcactgtggaggccaaggcaggcagatcacttgaggttaagactttgagaccagcctggctaacatggtgaaatcccgtctctactaaaaatacaaaaataggctgggcgtgctggcttacgtctataatctcaggtactcgggaggctgaggcaggagaattgcttgaacccaggaggcggaggttgcaaggagccaagattgtgccactgcactccagcctgggtgacagagcgagactccctctcaaaaaaaaaaaaaaaaaattcctccagcttgggtaacatggtgaaaccctatctctacaaaagacaaaagttgaaagttagctgaggctgggcgcagtggctcacgcctgtaatcccagcactttgggaggccgaggcaggtggatcacaaggtcaggagttcaaaaccagcctggccaagatggtgaaatcccatctgtactaaaagtacaaaaattagctgggcgcagtggcagggccctgtaatcccagctactcgggaggctgaggcaggagaattgctggaacccgggcggcagaggttgcagtgagccaagatcgtgccactgcactccagcctgggtgacagagtgagactccatctcaaaaaaaaaaaaaaaaaagttagctgagcatgatggcactcgcctgtaatcccagctactcgggaggctgaggtgggaggatcgcttgagcccaggaggcggaagttgcagtgagccaagatcacaccactgcactccagcctgctgggtgacaaagcaagacctgcctccaacaaaaaaaaagcaaaaacaaaaacaaaaaaacagccctatgtcaacctgttggttactctctgaggtagctggtacatgaaagggaggataaatgcatgcctctctctgcatgcctctttccattcattcaccaatttcagaatgaatgagattgcctagcatcctccaattttttttttaattatttatttttttgggatggagtttcactcttgtcgcccaggctggtgtgcagtggtgcgatcttggctcactgcaacctctgcctcccaggttcaagggattctcccacctcaacctctccagcagctaggattacaggcacccaccaccacgcctggctaattttttgtatttttagtagagacggggtttcgccatgttgggcgggctggtctcgaactcctgacctcaggtgatccgcctgcctcaacctcccaaagtgctgagattacaggcatgagccaccgcgcccagccaaaatatttttaagtattattatgatcttaaagattttaatatatttaacgagttttcactggacagtagaagcaccttcagtttggatcctgtgtctttgctgagaccctattagtcctggataccttccttgctctctagtatgaaagaagttagaagctcatcttacagatttattgccaaagattttaaattggctgggcacggtggctcaggcctgtaatcccagcactttgggaggccgaggtggggggatcatgaggtcaggagatcaagaccatcctggctatcacggtgaaaccccatctctactaaaatatacaaaaaaattagccaggcgtggtggtgggcacctgtagtcccagctactcgggaggctgaggcaggagaatggcatgaacccgggaggcggagcttgcagtgagccaagatcgtgccactgcactccagcctgggcgacagagcgagactccgtctcaaaaaaaaaaaaaaaagaaaagaaaaaaaaagattttaaattgacccttcttccaaggagcccaggttccttttgttaggttatggtatttaggaatagtaccacatgattttaatatggttttacagtattatttcatattttgtaggggctgccacacctcattatttgtttccaaaatgtcttagcttttccacacaaatttttccagtcaaactttagtgtcaaccttccaagttcccagtagggaaacaacattaaaattctgattaggattgaatggaatgtagattaatttggagccggttgagatctttagcatattaagtttttccatccagagacacggtgtgactcctcaccccttccagtcttgttttatgtctttcagtaaagttttgtcattttcttcatacaaatcttacatttcttgtcaagtttctatttctaataattttatagaaattttttctatggcaaaagggggctttttattcactacattttcttattgctgggaagttactaattcctgttatttatcttacaaatagccacattcctttttttttttgtcgttttttgagacagagtttcactcttgttgcccaggctggagtgcaatggcgcgatctcagctcgccgcaacctccgcctcccaggttcaagcaattctcctgcctcagcctcctgagtagctgggattgcaggcatgcaccaccatgcccggctaattttgtatttttagtagagatggggtttctccatgttggttaggctggtctcgaactcccaacctcaggtgactcacccatctcggcctcccaaagtgctgggattacaggcatgagccaccggcgcgcccagcctgttttggtttttttttttttttttttttgagatggagtctcgctctatcgcccaggctggagtgcagtggtgagatcttggctcactgcaagctccgcctcccagggtcaaggaattctcctgtctcagcctcaggattagctggtattacaggcgctcgccaccacacccagctaatttttttttgtatttttagtagagacagcgtttctccatgttggccaggctgttctcaaactcctgacctcaggtgatccgcccgccttggcctcccaaagtgttgggattacaggcatgagccacctcgcccagccaacaaatagccacattcttaactttgcatatttttccagttaattcacttagattttgatctagatgcacagtagtataatttacaaatagagataacttttgtttttcccttccaaatgtaactattctccttgtcttgttacactgtctgaaatctctaaagcagtgattctcaaccaccataatttcgctggggcaattctgtcataacattttttaattgttatgactgagggggaggagtaccattgtcatctgatagacagaggccagggatgctgcttaatatcccacaaggcacagaacaaccccccacaatgaagagttattgggtccaaaaatgtcaggagtaacactgagaaaccctgctctaaagcaatgaagaataatagcagtgggaagaggcatccctgccctctttgtaagttaacggaggccgggcgcggtggctcacgcctgtaatctcagcactttgggaggccgaggagggcagatcacctgaggtcaggcattcgagaccagcctggccaacatggtgaaaccctgtctccactaaaactacaaaaattagccaggcgtgatggtgggcacctgtaatcccagctactcgggaggccggggcagcagaatcacttgaacctgggaggcagaggttgcagtcagctgagatcacaccactgcactccagcctgggcaagaagagcgaaactccatttcaagaaaaaaattaaaattaaattaaaaaataagttaatggacacactgctaaaattgtatcattataaaatgtttgttactggttcctgataactagtcttcaccatcttaaggaaaatttctgtgttcctagtttactaaaagctttcatccaaaagagatggtgaatttcaccaaatgcctttttcacgtctatttaagataatcacatcgttttctcctctcgctctgtcacccagtctggtgggcagtggcgcaatcattggcttactgcagcttccaactcctcggctcaagcgatcctccagcctcagcctcccaagtagcaaggagtataggcacgtgctaatttttttaatttttttagagacaggatctcgctttgttgcctaggctggtctcaaatccctagctggtctcaaatcctcccactttggcctcccaagtgctgggattacaagcatgagccaccacacttagcctcccgtaacgttttaatatatgaatcatattaagagatttcctaatattgagccatctttagttttctgaaacaaaccctatgttattcccttaacatgctgccatgtttgctttgctactatattattgtaaactcttgtatctctattcagaagcaaaacgggtctatactctccttattttacactatccttgtgaccattcgaactggccttataaaatgaaatgtgaaatcttttatcttttcctgtactctggaagagcagaagaattatctattccttgagaatttcacaaaattagccataaaaccaaccaggctttgtgccttccaggagagagatcgttgacgatcttttctagttcttttatggtaattgattttccatctcttctccaacaacagcaaggatcagaggttgtggctatttcatagggaatatctgaagagggacagctacagggatgtcgtgggactgcatgtcatgggttaaacgggatgggtcatggggaactttggtgtttgaagggctctcacaggttgtgatgtctgggggagcatagctgtcactcaggtaggcattgctgggcttggccacctttaggtagacaacatcatacgtgttcttcagggctgccacagcatcttcatgcatgacgtcctctagccccacactgttgacctggagtcaaggaaagcaaagctcagacaaagccacaaatggcccaagacagaagcactggggtgaagtgatgaacttgggcctgccagggctagtaggtgagacccaaatctgggctagaaaatgggctagatggagtcctcaccgccaggatcttgtctccaatctgcaacctcccatccttgtgggcagcacccccttcgatgatctttgttacatagatgctattatctcctgggatgtgctggttccctacgccccctgcgatgctgaagccaagacctggatggaggggaggccagaggtgggtgcccaggaagcaggcttgggggcacaggacagttgggatgggggtgggaacaaaatgagttactacctttaggccccttgatgagcttgatctccatgaccttctcagccgggggcttccggcgcatgacatagaggcgaacgatggagcctgcctctttgagggcttccaccgccgctgagtgggtcacctcgcgcacgtccacttcatttacaaacaggatgctgtcgttgaccctgggagcagcaaggtgggcctgagccaagagcttcctgctgccctggccctccctctccagggaccaagcaacctaacccctgtctcctctccccacctgaggcggccatcctgggccgcagccccaccaggaatgatcttggtgatgaaaatggatgggtcgtcaccgatgtgtgggttgtcagtgccacctgcgatgctgaagcccagacctgagttaccctgggtgaaggaggggaagagggtcagctcccctcactgcccaagtctggcaaggcaagtggggtgggaaatggcttggagcagccagaggaggaaggcacagggtgaggggctagccacccagaccacatggcagaaagaaaggtacagacgggaggccacggggactgccgatggaggagcctgctcaccctttccaatgtgatttcctcgtattccatctccccctcggtcccgttcacctgcaactccagcacgggacagaaacacaaaagcagtgagacagacattcctgtctgaccacctgcccgtcatctgctgccctcccttactccctccttccttctgcaatggccccagccccaaaatctaaacaactcacatatcctggggcttctagggtatctgtgttgacaatcactgggggagaattggcctgtttgggaaaacaagagacaaaaagcagcctgagccttgactcgagagggagcccataacggagggtcccatcagcgtggctaccctttcagcctcttagccaagcccactccgccaccctgagagctgctcaagggcccagcctcaatccacatcacacacacgcacacgcgtgcacatgcgcacgcgcacacacacgcacagatgcacacgcgcaaggatctaactctgcccagcccggggccccctgcatgtggaaggaggtgtaggagaagcgggaagggagacagccagacggagaggggagcagcagatggcaaagagtggggagaggggggtaggcttgggggaagggagcttctcaccggatgtaacaccacagggtgttacatgccttatgtgctacacatggacaccccagggatcatgtccaccgggtcctggtccccatttcctgccccatccccccaaccccccatatctacccagatattttcataaccctcccctagacttgcccctcactttcacagacatttgccctaaaccctgcaccccgggaatccggggttccccagctgcaggcccctccctcggtctcaccaaccagccgtccaatccaccccttcctctaaggaccgtgttgcctagcaacggtatctaggaccagtcaagacccggggagacccacctccaggaggccctgtcgtcaggacaacaggggggtggggcgtggcctggggccgaccaaactcctgagcgcagaagggatccgctagccccgcctctcctgccctgggccccgccccacgttagccaggccgagaggaggccgggctgaagaggtttgtgggcgcagcgcatcctgaataacctgccttcctcgctcccctacgcccctcaccctacgcagtgcaaaggacgtcaggaactgggagtggtgaaagacatccgggtcctatcccgctcatctactccctccccccacttcattcgggaaagggttaaagtggggcgtgcccaggtccctgacgtcaatcgcctggtctctagactcccaggcggggcccgctttagcccggtcctaggggcttccccaattgccagggcaaccgaagccacgtctctatggcaatggggggaggccgccaagagcctccttccggggtccccaacctacttcctccttaaagaaacatgtatttgcagtcgcccaagcgcaaggattccccagtctccttcccgctctccccgtccaaaggggtccctcccctctcctactgctatttctcaagcctacaaactaccgaccattttcaagctgtatcacagatttcacacccataaatctattaacaccaccctccaacccttcacatatcagcaaatgctgttgtccaaccaacagtcactgactgccaaaatctcatccacgtgttcatcccccatcccacagcccgtcccccatcccacagcccgtcccccatcccgcagcccgtcccccatcccgcagcccgtcccccatcccgcagcccgtcccccatcccgcagcccgtcctccatcccatagcccgtcctccatcccatagcccatcctcaatccccatccccatccctatcctggaacctccttcccagcacacccaccttcatccactacgacattcatttgcttcccatccctatctctgcccgcatcccacatgctccatctccatccctgtctcgcccttcaacatccatcttccaaccccagcctccattctccatccgcttccctggccctgtcgcaccctccagccccatcccttaccaatgtggcctcatcctccatcccaatttctttttttccagagacaaggtctcgctgtgtcacccaggctggagtgcagtggtgtgatcatagctcactgcggccttgaactcctgggctcaagcagtcctcccacctcagcctcctgagtagctacaggcacatgccaccccacccagctactccatctcaatttctgattccccagagagtttatcaccattctcccttaccctaccttcataccctcaagattattctcaagtaacaatcttacacttctcaatcaactcccctctcttctgaaaattggggcttctcctgttccccaggtgaggccttgtcctgagacctccaccccatgcttatggcctccaacactctctccctccacccccttctgctcctgagctctgatcagcagcagctctgtactaactaccacccctcaggctccctacctcctcttccccctgctcagggatttaatggccctgccttgcacaaagcatctctagtcttctttccctcactcctagcatccacagaattcgcacaaacactctgtaccatccctgtctccagggccttcctttccttgctctgtcagcctcattcactgccctgatctcacagtcttatccctatctggcccctgacccaggacctcttacccttcctatcccccaactcctctcttgccagttctaactccagaacctgcttgcccgctccctaggctcagagacctcctccccatcttcttggtgaaatgtcagcaacctcccccttcccagagcatcccacaacatcctagaatccccaccctgaccccacagtgtcccctcaatctcacagcttgcctggtgctctccagtcctccccatcctgtgtccccagaagaggagatggaggaaggggaagatggaaagtggactggagaatggaaggtcccagaaaccaggcctcccgggactggagagaggaggacgctgtgagcagagaggagaaagggaaacaggtggtgggggatgatggagggggcagagggggatagaaagaagatatggcagaggtgagaacccaagaggatgagagaggggaggaggaaaagagggaaggtgaagatgaataggcaagagggaacatgggaaaggggagctggctgatggagggagaggactgatgagggaaaggactgatcaggccccagcggcctgggctggggatcagggagagggagaggagaatgcgtgggaggaagagagagacagcatcaagagccagccagccagccagccagcagggaggaaaggctgcagagggggaagagaactcaggagtggagcaaagctggggcaggggacgaggcagcaaggccccaccatgtgaagtctcaggccagacagatggaaagagctggagacttggggacagggcgagccaggcccagaggcggaggtagggggaggaggcggggaagggacaagagcaaatgagggcagcaggcgcttggaacagagctctggacacagaaaatggaaatggaggttgggggtgtgaaggaatgaagaggtcccaggcgtgggggcctcttgggggatgcacacacctcaacacacacgcatacagcacacgcacaggcacacaaacggcgcacgcacgcacacacacacacagcacacacacaggcacgcatgcatgcacacacgcacaggcacacacacagcacacgcgcacaggcacgcgcgcacacacacattcttgctttaggctttacatccactcccattggcctggcctgtttctcctctgtgggaccaaggtgtttccagccccacaaacgccccctcccccagaccccaggagcccaagccccaaacccccgcccccagtcccagcatccccctccccacggctctctctcaccctaccggcccttagggattgctgcagctccgaggctccgagggccgcactggggagggggccaccagggtctcctaccttgaagggggagaggtgggcgtggcccacgaccccgtggccagcctcgaggtgggacaagttcctctccgccacgtgcaccagctcgggggcgtttacctggttggggaggtgggccgggctgtgctccagagggggcgtgtcttcatcttggtagcggtatttctggggatggggacggaggtgtcactggggccagcccggtgcctcaggctccaggctggccgccctggccgccgcctcttcccccagccagtgcagtgcggaaggccctggggcctgaccagctcctccccctccctctcctctagcccattggctcccctctctccactctcccaacagccccctctcccgccagggcctcagcacctctcatcaatccccaggtcccaatcccatcccccaactcctactcctcacatcctgggacactggccttctggtgggcatagcccctctggcatctgtgtcttcacccctttccccaccaccttcatcttcgagtccctccagcttctcagagctctagccccgacactcacatctccattctctgcctccagtccccaacttccttgcttctctcaccatctcagactcactcttgttctagcctcccctcccctacccctctggctgctcctactctgcatggcatcctccccgcgccccacctccatggcctcagtctccccattgcagcctctaccccacaggtgattggctctcctttaccttgcactccttaggcaaggactgaagtcaccccttccaccagaaggtacttggtatcagcccccgagacaggacaaggctaagcctgtccagttcactgcccttgctggtttccaagcagtcaacagaggggccccgggagtctggccctacccctgcaacagcccacagcccagccagctaatccggttatgctataagggcatgggctgggggaggaaggggaagaacagagacagcagggctcaggacaggggcaagaatgggtgccagcctccctggttggggaggagggtagcatgctgagcctcagagtgaatttctggtctccctctgctcttttggggtgaaaggcccaacatgacccctgactccctgcccagttaatcagctgccatcccaagggcctcctgtgctagcttaatagggacaacagtaaaatgagattaactgggggccagagaaggaggaaaagggcagatggagacagcagaagaagacagcgtttctgcctgggtccttccgtgtccgcctctgccctcgcctgctcctctcctctggaacgggcctccacagagactgaccctccaagctccaggttcaggaaggggaaggtatcatacgcagggatccctcaggaactgaagaagacagaatgcaccgcccagtacacatgggtaaaaagagaaggcacggcaatcccagcactttgggaggctgaggcaggcagacagcttgagcccaggagctggagttggagaccagcctgggcaacacagtgaaaccctgtctacaaaaaatacaaaaattagccaggcatggtggtgcacacctgtagtcccaactgctaaggaggctgaggtgggaggattgcttgagcccaagaggtggaggctgcagtgagccatgatcacgccaccgcactccagcctgggcaacagagtaagaccctgtctcaaaaagagagagaggccaggagcagtggctgatgcttataatgccgaggtgggtacatcacctgaggtcagagaccagcctggccaacatggtgaaatcccatctctactaaaaatacaaaaattagctgggcgtggtggcacatggctgtaatcctagctacatgggaggctgaggcaggagaattgcttgaacctgggaagcggaggttgcagtgagccgagatcatgccactgcactctagcctggcgacagagtgagactccatctccaaaacaaaaaagagagagggcgagcagaatttccctcccaaaagtttctgagaggctgagagtgccctaatacttagagggcagcagctgcgagatcaaatgggaggaagcttatcaaggtcaatggccaatccttgagtaggattctgaaaatgttaaagatgatgaatcaaggctgagaatataacacaactttggctgtagagtaagggtacagtaagagaatgggagaagggaagtggtcctgtcagcacgaaaactctcaaacccagaacacagagacaactcaaatcaagaagcaccctgatacatttaaagagtcttaaagaaggaaaacgggctcagcaagattgagtctattctctgggccacagacttggagagaatcctgaactccagatttcaatccgatgggcacaaaaagtagagaaggaaaataggagaacacacaaaatagccctcctccaaggctgagctgtcttgaataaaggagttctatgaaccaacagagactgttcattccacatcctgagaaggtggtcttctacctgggcagtgcacaagctgaggggcaagccccagaattgagacctgggggaaggggtggaagccgctctccgctatccactcttccttcacaaggcctccaattccctgcaaggtaaattaggaccaaagctccaagttttggagtctgggggagggtttgagtccagtgcctctccatcttcactccacctcagagagaaaattcctgaatctgaggaggaaatgtcagcgtgcacccaaagaaaatggaaacatgaggagggccatttcatcatttattctagggaggaaatgaaggtaaacttttatctcagcgagcccccaatacctctccctgccccacccccatggagggagggtggtgtctggcactgaagaaaaggctcctcaggattgggaggcaacatggagaaaatggggaacaagaaatgggtgccagggtttccagaatgtggctggaagaggttagggactaggttcagtctctggaaattttcgacgtacatgtaggggggcggggagaaacgtcgggaggggtgggggtgggggcgggggagagtaattctgaaactgcagactggggggctggggcggtgggggatcagcacctctcagtcttggattacagggcaactaaagcaggacgggaaaggaggaccccccccatcctttatcctactgggactcagggccctaacccagacaactcagatgctactgggacatatctgcacccccaatatattagggcttaaaacaagtaaaaggcctggggaatgggggacacggacggagtcgctgttgttccttcccctttggccccctcctcaccagagccccagttgcacagaatgacctggaactgaggcttgcacccccaaaacataggggtgtgagtcaaagtgaatgataagaggggcgacccacggcgcctgtccacgagaagttgcaacccagagaccccgcaccaagcagaaggaagagcgacagcgcttgaagcttgcaccctgatatttgcgggggtccgggaagggggagcgggccggagcccataccgcggcacgtaccacgcagagacacatggaggcgaatctgttccgagccgacatggagaaggggagggggactgagggaagggggtaggtgggatatcaagggtcccgggggttgggggagggggaggggcagaggggcgggggctgcggcggccgcggcaactggaggctgcggcggggggggggggggggtgacggcgcctgcgcagtaaggaagagcgtcacgttgggagagaggggtgaggggagaccctcttagccaccaacttccctggttcacgctgtttctctgtgaacttcactttccacagtatacttctattccgacccctctacaattaaagacagacttaaatttaccagtttatctctctagttctcagggaccccttattccatcccatctaatcccccaaccccaacatcgcgagaccccaaaccattccaaaacctcactggacatctcgtcactactggcctcccagagtccagggaaacaaacagcacttctctcacaagaacccccaagggatctacactgcctctcccaccaaacccccgcaagattggtgctgtggatagcatctcctcagattccaaggcatctcctactctaaccagcatagttctcccctgcagtccagccccacctgataggcagcccatgtttcttcaagagtttaaggaaccacagagccttgttggccccccaaattaatatatgctaaatcatccctttctatatcacatctatctcccaatccactaacagggatgttgcaattagtgcaaatattactcttgctctaatataaacatccaaataacaagtcctctaatttgttggggatcccctgtccaaacccccgaatctaataagatactcatgacttcctaatatgccagtctccaaatccacaccagaacccaatttcaggaaatatttaatctactttaaagcagaccctccaaattaaatagcaatctcgtcaattttttccaaaactcttataaaaagaaatgtagacgggaagatcgctggaggccaggtgcccaacaccagcttgggcaacatagtgagatcccatctctaaaaaaaaaaattttggcctggcacggtggctcacacctgtaatcccagcactttgggaggccgaggcggttggatcatgaggtcaggcgttccagaccagcctggccaagatggtgaaaccccatctctactaaaactacaaaaattagccgggcgcggtggcaggcgcctgtaatcctagctactagggaggctgaggcaggaggatggcttgaatctgggcagcagagattgcagtgagccgagatcgtgccactgcactctagcctaggcgacagagtgagactcggtctcaaaaattaataattaattaattaaaagtattttccttttccttttcttttctttctttctttcttttttttttttttttttttgagacagattctcgctctgttgctcatgctggagtgcaatggcgcgatctcggcttactgcaacatccggctcccgggttcgagtgattctcctacctcaacctcccggatatctggcattacaggcgcccgccactacgcccggctaatttttttgtatttttagtagagacggggtatcgccatgttggccaggctggtctcgaactcgtgacctcacatgatccgcgcgcctcgggctcccaaagtgctgggattacaggtgtgagccaccgcacccggcacctcctctccttttctttacccctgaggttcatagattacacccttttctgtctgcccagaacatcccctccacgattctgaattccaactttgtcggaagattgctcccaaatatatcttctccacactcaggcctcaaaaaatacacaccaaagatacggccggcaatctgcaatgacccacaaatcgtccagaacactcccaaccgcctccttcaggtctcttcagagatttccattttctcccaaacaacttaacctgaaagcctctcttccaaatattctcccattgaacgcccacccttccagctcttaaaacccagtgaggggtctcctcaaatcggctgacttctataaaatgcccatacatggtagaaatgacgacttccctagaatctcacccaagcgagattgaccccgttgatcggcatctgttacatgcgcccccaagatgacccccaatgtcctagtttcatatctggtaggaaggcttggatcaccagaggatccaaggagtcagtgcggaaggggctggactcaaatttccttctagaatagaaaacctgcaggccctgcttatccaccagtgggcgccatggcccataaagacccttccccatcccccatttcccttttccctccattttccgtttctctgttgcctggcaacgcagcaatcaaggactttgccgtcgcctagcaaccgtctcctgggaacacagagctgaggtaggaggggtgctctgatgaaatctgaacagacctccatcttaggaaaattgagacgtcagacttcccaacccccggattctcctttccaaagacccccgcgccctgaagttacttggacaatagctcctcaaaccctgtctcctttacgcacggggggccacgccacgcccatcccaggtcagccccgccctcatttcggtcaggtaacccagccccaaggttcctcccctttccgaaggttgctgcctccctcgatagagtaagccagaccccacccacctgcccgggaggccacgcctccgtccacttcccgcccgttcgctccccctgcctcgcccacactgtccctccgccacgcccctgacggccaatgaatgaggccgtcggccacactgccccgcccccggcatctcggctttgcccaataaggaccacccggagggtttaaccgcttcgctcctggggctctggcaaatagcctcagtctttcccccactgtatccccacccccacttgttctgctccgccttccgccaccctcgcccggccctccagtccgccacgcagcttcagtcgtcgccggttaccatggcaacggcggcagcagcgcggggaaagggggagggacgggggcggagtgggagaaagagatgctcagagacgagagattctggcagagataaaggcaccaagaaagacaaagtgatcgctgtagagtggagtttgcacacaacacagggcctagcacgcagtaggctttcaataaatgttccttaaattactgcggcaggagtctaaatataggcaatgaaagatggaagactcaggcagagctggggagctcaacgaccgcaaagcctgagcactccctaccccatccagcatttggggaagcaggagccatgtgccccctgcaggctcctcttgggctaccctccgctggctgccctggatagagatgaaccacaactcccaacagcgccatgggcagcaaccctctaacattgagggatctggtgcctcggggccttatgggagttggagtccccaccataccgaggctgacaagttttccagccaaggaatgtggcaagcctgggtctccacgcctctgtaaaccccaaatgcatgatctgctctgtaagcctccttccttcagggatgctcaaccctgggctccatggaagaagtaggagtctggagtgggtaatgaataaggccacccacccacccagaatagctgcctgctggcaagcccctcaccctcgctcccatttgtgtgttcacgtgttggaagcagagcccacacattccagcgggctttctatttacacctggaatgcaggggaccacagccatggagcctaaggccaagtgacaggcctaagggcaggagacagcgggagcagaggaaaccaggccagagaaactgaggcataaaaatccaccgaaactacaggggatgtggggaagaggcagcctgggagaaagcccgaaacccacagaatgaaggacaagaaagtcgccctggtggagagagggtgggggctccagatctaaaggtcctcagcccccaatctcttccaaccatcctcacacgtgcacaatgcatgtgtacacacatgtgtgagtttgtggcagggaacatgtgtgtcctcagctccctcccatgaaaagctgcagttcccactaaatataaccccctccccagcctgtgactcacccggaccccgcctcccccggcccccacttcctgtcccaccccccagcccccagctgcctgccacccgcccaagcctccctccacacaccaggcatccagctctccagtcccagagtctccaaggagagcctaggtatctgcatcccaccaggagctcgcctgtgctccatccgagatctcctgcctttgccaggctccaaccagagggacactcttgcacagatccccatcgctgccagccctgccctcctcctacaccttttcaccccagtaacctcagtaacttcggtcataagccctcagggacccttaaatccaggtgtcctcccccaccttgatcccaagcgtcaggggtatctggaacagtccccacatctgctcttctccctctctcttgatcagggctagatacagtgtgggaggagatggggatattgggcacctgcctttgggccacccccaaattgtgcaccacccacccggtccccctcctcaaatcccctctctccctaagcctctcatcctcctcctcaggggctggcaagctcggctgctgcaatcttctgcctcctatgggagtacccccaaatccttgcctcacctggtccattccctcaggtgatcccatgccagggccccagccctctgacaacttccaactacctccattctatatgactgaaccctaaattaacagttccctcaaattgagagagcatccctaaatgcagccaccacgagatgcttgttctagagtctgaaggcccaccccttccctgccagctgacacccccagatcagtcaggcactcacaaccaataacctttaccccatgccaggagccccccaaaactggacaaggcccttggaagccagcttttccctggggaggaaagaggaaccccccaacatagcccaccttcccacatacaccagcaggactcccttatgagccaggcttctccttaaataagtctccctcaaacagcgctgatgaacccccaaacccgccaggccccccgaaccatggaatatcctaaattttccatatccctacaggtacaaagggatcactccagggggcacctgtggccaaatcctgcattttctcagatgtgaaccccaaaactaaattaagacccccaaatacatcttacttctgatgctgccactccaggggcgccagtcccagataaggcctactaacccctccccacaaactcataccctccccccagtttatagcccccccatcatgcttaccttggttgtcactatacagagacagtccatgttggggggcctggccgcggcggcgggtaaggggctctgacttcatcggagtttcgttcctcccctccgtgggttctcacccctcccccctccgcaccccacttttgcagggggggccaggatggggggaggggtgagaggggaaggagggggttggagaagggaaggggaggggagcgtgggagggaggggaagggggccctaaaaggggctccccagtggaggggagggggcttggggagcacaccccgattctcaggaggggcgggggcaccgggggctggcagccccggagttcgggggctggggcatgagctggggtgggggaggggaactggatttcggggagccccggggtaggggggggtcttgccaaacggccaggggctaggggccgtggcgggggagtggggtgggggggttggaaacggcagcggccgagggagccgtggagccgaagagggaaggggagagaggaggagagaggaagcagggggagggagggagggagctaggagccagaatggggggggtgccttggcagagttaactccttctgtgctggcaggaacccggataatgggaaaggagatagaagcagaagcacagaggcccctgaggcaaacatggagacctggccagccaccagcgatgacagcaaagacgatgaggctggatttcatttcttagagaaggaagcatctatagttgggctgggagcacccacggttatttgaatacgggagggaggcctctcggcaggcggtagggggtcgggtgtgagggaggagctgaaggaggcaatccctgggggcctagttctccctcaggtttctcagggggaaacctaaaaagttaagccctagactctttagtgcctgaaactggggcagccaaagaaaacgaggaagaaagggagagtgggtacaggaccacagagagtgcattctcggtgccccaagtccctgggccactgactcaggcttttgtcagcagggcccccaagattccaggtaatattagtgatatttggctcacccctccagccctgcctgcccctcaggaagttaggcgctcgcccccacctccttacctgactctctgagagggaagcctcataatagtccaggatgtctgtcacaggaacagaactgagttacctccccaccccaggcctctccaggcacatcacccctgtcatcaccgctgctggctggctggcaagggaggagccctttcagccaaggctggtccacactcatggaggacaccataggcaggaccctgcatggtgctccagcttggaccaaatgatctctgggctcccaaacagcccccgaagttcagtaatggcccttggaggcccaggtccctcagaaaacgggctactcacccagcaaggcctggaagaggtcgctatgcagcactgtgaggagtgggggtgcccaccgcagcagtgggggtgccaggagccagagggctgacctgggagctagtgagatgcaaggagaattgggacagggaagatgccaacacaggaagatgaacacactgtcacttcatctccccagactgtgcccttcaccccagcccctacggaaagatttggggagaaggatctccgagccccagccccccacttcgctcccagacctcccctccacaaggagccctgtttttcacctcttggtctctgggacatctctctcttctctcactttaatctccctaatcctccaggattggagttgagctgcttctccccactaaattccagctgtgagtaaagtaggccgtctctgagccgaccagctgtcccattcccccaggtcccaaggcaccagcaccgccaccatcttgctccacacaccctggccccctcttcccataggcaggcagaacctagccacgctctcctgagaagccagcaaagagggcctcctcacagagggctccagcagctcaaaaagaagctgagcccagctctctctcctcctgggcctcctctcaccccaatgagaattgcagaaaaaggggtagaaattgtttgggacttcctgccctagggctagagaagttggggttttacgggtaagaggcaggagaattcctgcagttcctctcaggcccgggaggaatccatctgcctgggcacatggtctctggaaggaacagagggcaaagacagaagggaatgttcaggaaggtctcagaggctttactaagggaggggcagtgaatctgggggggtcttcctactgtgaaactgtagctgttccaagagttagtgaatggcctacatctcagaagaatacacttagggtactcacaccctagcttgggtgccccccaccactgtaccctcccttttgtgttggccgagatagatttcatcaggaaccctagagtctgtctttccatgtctctgcctctgccatctaccttacacttctctttccctacttttcccttctaaccccaccggagaagccctcccttcagtccacctccatccctctggctgcagtgacttaagccccttcctcttctgtcccatcctatcccatcaccccgtcggaggactagactctaggtcggacgggcgggattaaggagtttgggggagacgagggacgcttggagatccctctaagtcagcggaacgcagggccgggctccagggaactacagctcccagcatgccccggggcccgcaaccgtccgccgcccggtgcactgtggacgatgagtcagggttaggggcgccaggacgtgggcgtgcaggacgccagagctgggtcagagctcgagccagcggcgcccggagagattcggagatgcaggcggctcggatggccgcgagcttggggcggcagctgctgaggctcgggggcggaaggtctgtgtgtgacaagagggacggtgggcagcggccctgggcaccgggccggcactgaacccccactccccacagctcgcggctcacggcgctcctggggcagccccggcccggccctgcccggcggccctatgccgggggtgccgctcaggtaagtcaccgcagccttggcaagggggtgtgggagcggcggtccgcttcggcgcccgccatcggcagggatctccctcttggtgccaggtacctgcctactgctcagtcgccgaaagtaggggaaagggcaagccagggtgccctagggcgaaactaggggaaaggtcaccgcttcgcgccgcctccccgcgcggctctcgcctgttctccccttgacacagcggaagtcccttccctgaacttgctaaccgtctcttttcccagctggctctggacaagtcagattcccacccctctgacgctctgaccaggaaaaaaccggccaaggcggtaggtagccccgaggccaggtggaccttagccagacccaaccagagccctgaaatttgcctctctctgcccaggaatctaagtcctttgctgtgggaatgttcaaaggccagctcaccacagatcaggtgttcccatacccgtccggtaagggaagggataatcagagctgggtggggccagggtggtttcccctgccagcctggcctgaccagcctgtcccccaccctctgcagtgctcaacgaagagcagacacagtttcttaaagagctggtggagcctgtgtcccgtttcttcgaggtaaggaatgactcggggcttggtccctggtgaggtgtttggagatgttaagctcaaaaggagcctggatgtgggatcctgtgccttccccaggaagtgaacgatcccgccaagaatgacgctctggagatggtggaggagaccacttggcagggcctcaaggagctgggggcctttggtctgcaagtgcccagtgagctgggtggtgtgggcctttgcaacacccaggtgagggcgccctatcgccacatcccagtatgccataccccagcttggcagactcagctcttttgccatagacctagagactagggctaaggtctcttctaagcacctgccctgggtgcctgtgggatggatgttaactgtccaaacataacacaatttacatgcagtcccctaggcctgagccatgggcctcaccctggttcccaagtccttacaaatctctaagttggggattgcctaacaatagactgactagtagcaagtcaccctcctacctagacctaagacagaccagcattctctgctgtgccctttgcacaccccacttcttttctacacactggggatggcccaggtcaggcactgccctaggtcaggaactgccctaggtcaggaactgccctgttgcccacactctcctgttaaggtcaggtccccctgcagccagtgacaaccccagattcctgcttcccctccagtacgcccgtttgg

SEQ ID NO: 157 - DNA, 11403 bp, Homo sapiens
  source 1..11403: mol_type = genomic DNA
tcatctgcgatgtgcgtatgcaaccacagcaagcctccctcagatgcattctgctgtgggtcacgtcacagacacggcggtccatacacacccggaaactgtcgtgtttgcgtgtgcgtgtattcactgtatggtccggcttaatgcttttgcttatgggaagtttcaaacgtgtacgaaagaggaaagaacacggaagtgagcgcccccatgggccactcccagctgcagcgacccccagcagtgctcgtgggactccccgtgccaccgtgcccgcggcggggggctccgaatcagtcccaggcctcgtattgtttcatccataaatatttcagaattttctctaaaagataaggtctctttttaaactgaacagtaataacacatcacatctaaactatttagcaggtgcactttaaaatcatgtggatatcccagtcagcgcttacatgtctccagtgggttcataaaatttttaaactgtttgaaacaggaaccagatccagacgctgcgatggattgatatgtccgtgtctctttgtatctatgggttccccctcaccattttcttgttttttccttgcaatttatttggctacagagttccctggattcggctgcgcagatgcgtggggcgtcgaggaaggagttttcagtcccgtgtttccgtaactggtaatgagactgagagctgtcatcggattcaagctcaatgttcttagcaaaacacttctcctctttgctggtgttgctggcctggcatttaacgtgcccttaatgcaaggaggaaatgcaagcggagtcgggtctgaggggagtgagcgccagtgcctccgcgcagctcctgctacatcggtcgccctctttccatcctgggaaccgctcagcgctttgaggtacgcgcaagttaaaaatgcaatcactaccataaggaacccgggcttagcggggggcaaagcggcaaatgaggggtcagcccacagggagcccgtgcggtcctgctgagccagcaggcgggacgcgcttagagacggggctgcccaccgacgggaagcggaggagcagcttccgtgactcccacgccccgtctggggccatgttggcgtcaaacggcgacaaaatcatgacagctgtgacccactgggtacaaaataactcacaagtctacactgacatgaatgaatgaatgaatgaatgaatgaatgaatgaatgaggaacgctcattctttctgcggaaagaactaataaatgcatggggggatggaattagaaaatcgcggctgcttcatgcgcgtgcctgctcttaccaagtcacctcatgatggccagcaagcagcttcctgagggaggagaggaacgggctgcttctcatggatccagggaaaccaaagccttgaaaagagaaacaccaaggccacctctgccctcagcctcgcgggccgcaggtgagtgagcacacctccgctctaaggcaaagccaagtaactacgccttctggttgtcattcataaaatttattttggaaaaatattttaaaaaggaatttcttcattaacaaaacagtaaaaaactcaaataacatttgcacaatattccataaatacatttatatacaaaaaaatatagtcacatagacccgaagtgcctttgtacatatttaccaaaatttaaattataaaaaacgaacatcacaaaatactcaagctttacagatatcatgaaaaatatttttacaaatccaaaaaataacacacatcttttccatctagaaaaagcacatcttcgtatcaaaaaggacaataaaggcagtgtttgtgtttctaattcaagaaaagactggctcataagaatccaaaatatacactcaggcagtgcatgcttcttatgcgtaattcagttcacccatttaaatatatattctcttaagagcaactgtccatagtgcaacggcgacgtcacggaaggcagtgccgcaggcggccgggccgcgacaggctgtcggcaggcgtcgaggacctcaggaggagaacctgctcggtctgaactcggtttctcagcagcagtccacgaggcctccctcctcttcagcagcattcgttggggcatatatccttggaattttacttattttaagagaaacgggagtcttgccatctcacttccattttacacctggggggccacaagacaaatgggaagttagcctgagaccgattcccgtgctccagcttcaggtgctcccatgccgaggaggagggagcggctgctgcctgcactgacctcagttgctatgacgcactcatccttctcctcggatatgacgtacaccgactggtacttggtgtcttttgaagttgaacagcccgagtccggcctttttctttcagatgcttctccactaaaaggaaaatagagaaaatccacaatgaatgcatgagaacatttgggaagagaaacggagcagtggttccaggaagacaccccccaggtaccccctcctgatgcccggcccgcagcacgcaccccctgagtgtggtcggggtccccttctcctcccctgaggagccctggggctggcacttggtgtcacgcttgctgtgcgcgtccctgacggcggtgtcgtcacccttgaggtcctgcacgaggttatagtccaccgctgggtagcgggccttgaagccattcttgtcggcgctgtggtccccgtggaagtccgccttcttgttggtgttcttgatctgcgtggccccgatgatgctgactgagatgtccttctcacgctggcagttggccaggttgttcatggtctccgtctccccccggcaggggtcggctgggggccggtgcttctgcagcctcagccggacgcagaccaccacagcggcacagcccagcagcagcatgaggacaaggatgaccccggcgcacacggccacccaggggaatggcccgccctggccctctagcttctcagtgaggtccaccaccgctgggcccgggggcagctcggggagcaggaactggcagttgggacccccgtagcctcgggcacactcgcacacatagcggtggcccctctcgtggcaggtggccccattgtggcagggtgcgtgctcgcacctgctgacgggggcactgcagttcctgcccgtgtagccaggcgggcaggtgcaggagaagtcgttcacgccatcccggcaggtgcccccgttggcgcacggggaggaggcgcagtcgtccacgttgtcgtcacagtgcctccccgagaagccggcctggcagcggcacaggtaggcatcaccgaggtccacacacttggcacctggaacacagggacatgaacatcacgtgtctcctcgtaggtttgttcaccaaaaagtcactctgaagcatctatctgtctgacactgtagaaaccagacaaaccaaagacagtctgtggcctgaatgagtccacagcgcaaggtgacatggtttaggacctcaaatacgagaggtgtccaggtctagctctacaagtcagaaaccacacggccagcatctggacaggcgctgtgcagaacactctggtggctgcattagtcgccacaacagccgggcaagagcatgtgccactcgacccaggtttcagatggggaaactgaggcttaacgagggtgtccttgcccacagttacacagcaagtgagaggagcaggcactgacaacaggggagggagggaggggaaggatgaccattccggaatgctccggcacatctggggcccagctctccttgctgtgtgtctcctttgggcagccagcccctcgctgctagcaggaggctctctgtcctcactcagggacacccccaactactgtgctgggtggccacacagctgggccatcctcccaagctggagtggccggcacctgtgggcatcacttactgaacctcaggcggccgcaggtgcccgaagcaccttgtggccctgagcaagtcattcactgcttggtctaggtttccacagagaacttcataacaaatgccctggcctctctcattccccaggcctttccagactcaaagatagagtttccatcgagaattcctggcggtctggataaaagtgattcataaactcgaggtcactcacaaatgcttgtttttaatgccacctcagtattgaccgctcgcccgagtctctgagcaatcaccagctgcccccttaccattagaacagggtgaagagctgcagtagtcaattttcttctcacagttgaagccggagtagcccacggggcagcggcagctgtaccctccatcggggctgtctgagcaccgacccccgttaaagcaagggccgtccgcacaggtcatggcactcaattcacagattttgccgtagaagccgggtgggcaggtacaggagtagctgttctcgagatcctacacgatggagaggtcagaaaaggctttccaaagttgctccaaggagcccacacactccattcaacaccagggcaccccagcttccgggtgagatgccatggagcctccgactcaccgtgcagctccctccgttcttacaagggctggggtcacactcgtcaatccccagctcgcaggtggcacctgtgtacccaggccggcaagagcaagtgtagctcccctggcccgtgttggtgcaggtggctccattcttgcagggcttatggtgtgtgcagtagttcaggtctgtgaagggtggggacaggaaaagtaggagataggaagctcgacatcaaatgcaggaagactttatttttccagtgatcaaacagccagggaagtccagggctgctctggagggagcaggctgcctcagggagagaaggcttaccctggttgcagaaaaggcccccccagccttcctggcagttgcactgccagggctgctggcaggtgccatggagacagcctggatagcggatacactcgtcacagtaccggccctgccagcccactctgcaccttggagaaaagcagaagactcagatggacgttgactgttgctggctttgcagtggacattctcaccctagaaaccatcttcccgcagcaccagtgagcctctggttctccagattagcagaacactgggtcaccttgggagctgcagcctgggcctgggccccaccagaggttctggcttcttgggtgttagggcagcaccagtgtcagcatctcaaaaatcactccctgagtgattctaggatgaggcaacatttgagaaccattgaactatactatcatttcctgtgccaactctttttaaactactatctgtaaattctcatagccgttaaggggcttagacgaatgacaactccatgaccttacatgctgccaaacattgattaagtagaaacatgagaaaacggccccctgttcaatcaatcttactggagtttttcgaatgatcacctagggctgtttttacaaatacaccagctgtgaaaagataacaagaaaaggcaacaaaacaaaacaccaccttgtgcagacttacttgcattcccctggtttgtcacaaaatccatgctgctcatcacatccaggcaggcagatcgctacaagcaaaggaaaaacagggtcaagccccacgccaagtacgtcccaacagggctgccgcccttggggccaggacacaactcgccggcttcagtcagcaaatcccagctgagttaatcttcccaggttgtggaggactgacccccctgcctagtagcctgggacttgactcagccctggggatgagcattcttcttaacacaggggctcaaggacaaaagggctctcggaagcccccacccccaccctatccccttttcttctaagagagggtcagaagtcttccccctcctcctcccccacttcccaattctgtgcacaaagctccacctcttaatatcccagaaagtgtgtgtgcagataagagtggacagctggtatgcagggtgccagggcaggacagctgctccattgtctgtcctccacggcagctgccccagcgcaacaatgccggcctcccccgcgcccccggccccacctcctcacacacacccctcgcgtgtacacacacacacacacacacacacgcacacgcaccccttccgccaatgggagccggcgggtgtccctgcgcctatccccggagagatctaatctatggcacgcgcgagctgggggcggggagagacttcagtgtttgaagaaaaaagtttaagtttctggctaccctgtggtgaagagaggcagggaggaagggtgggaggcagcagactggccagaggctcccgcagggcagggagtagacagtgggcttgaggcttggagctggctcttgctgcctggttatgaaactcattaacaagcagctccacaagttgttttttgtttttttgtttttccccagaaccagttcaggccaaggcaaagcttagaaggagctcagtaagttccggagggaatttgggaagctaaggagcaaggacatcaaggcactcagtgaatgggaagacccaccctcaaccccaggcactacccagctcctgccagaggttctgggcctcccagagcccctctccaaggttgtccagttccaaggaaggagaatgacagttccctggagtttctgggcagctccaggacctacccaatccccagctgtagagaaatccggtaccaatgggctgggacggccaggcgtgcaggcgaggcctcagtcagctggagagagggctcctgaggtccccatgagccagaaccaggagccagcacggccccaaccctgccctagtcacctgcctgccatgacattgacacatcaatacctaataagaggcaggtagagcctctgtcactattgggaagacattgcttctccagacaaggtgctgcctgagcattcaagccagacggggctgtgcacccctcgcccacacaggccttggagacctggcctcagcagcccacaggagtgaaagcctgctctctggccagcatagacagtgcgtgtcacagggagtatccggaaaggcgtttgctccagagaggtcaagcacaccagctccagagagaaaatggaacgtttcccagtgtgatgctgttccagcactgggaactcgggttgaaatggtgcccctgacacacaagctctctctgtgttcctcccttccttcctcctctccctctctaatacacacaccctgggggtagcactggctttacttcctgacccctggccctgtctctaaaatcctccctgattaagaaaggcagttccgatagtggataaacacagcctgggatgttaaaatgtctgcgttgaccccaacccccccactgacgagctgtgacttatagcaatccacttctgtcctctgggcctcagtttccccaccagaacatctctacagtcccaagccccccgtggctcaggaagccccgtccctgcgcgcggtccgtgttcgtggacgagtgagccagcggtgccttcccagagactcacgctctgtgcagtagggccctttccagccagggttgcacactttctccccacgctccccacaggtgaagtggccgaaggcatcgtcccggggacggcagaaaacggagcagccctctccgtagtagtgttcgtcacacacgaagcggtaggagtacttgaggtccgtgcggccgctgctgtgcaggtcctgggaccactcctcgcccaccgtcaggtgcctctgggtggccaggcggctgatgagtctttctgggttttctacggggagaagatgctcctggttggttctgaacgagaaccctgtgactcgggacagagcgggggtgggccgagacattcagcacgggaaggaggcccaagctgctccaccctgaactttctggggcacgtgcagaatgaaagctgtccgggtttggctgggggatgggtgggcaaagtccaatgctattaactggggaaagcagttttggggtttgggttttgtttttacctgttgcgaggtcatcaggagaatctgtgtggagagcttcaataatcagagagaaggtgccctgggagagaggggagaagacgttagacaacccagaaaggtaacgaaaagaaaacggcaaaaagcagtcattcctaacagccaggtcagcaacagaggcctgaaggctgcaggtctggggcagcgtgtctggagagggtctccacgcacctcctgcctgctctcaccttccctaaggaaatggaagaactttttaaagagtggtttcctgacgtgttttttcagcctgtactacaggatattacgttgtttttttaattagagagagagagagaatgcaggcaggatggggtggaagaggcccgagggcccttgtcatttttcttgggggatgggcacgctccgggtggtagcggtcgcgctgcgcgggtaatcgcgccaccaacgcgtctaggagtcgggaaaccagaaccttcccacgtgaaggggcgcctctgactggagacctggcacagaggccggatacggaaatctcccgggcgcgctcggcctctcctcctcgccccagcgcggtcccctcctgcaggccgcggggccccggggcgaggtgtccgcgctgctgggctggagtcctggggccgccgctaggcagatcgcagcgcccacctgcgcctcgcggggtccccgaggtcccgccaccgagcgcccaaggcgggatcccagcgcgtcctgcagcccgcccagcttcagggccggcccggcgcgcgcaggtgcggcactcaccggccaggtgaagccgaaggggaagcggatggggttgctgaacgcggagtcggcgcccccgccgtcgggcagactgaaggagtcgacgcccagcacgggggtgacggcgctgccgtaggtgcagggcggctcgggggacacgctggcctggtagtgcttgaggcacacgcggaagaaggtccggcaggcgcacggcggtggccccgcgcccccgcggcagcagttgcggttccccagcagccccttcttgttgacgaactcctgcagcttcagttcgaacaccccagagctccagacctgcacgggggagggcgggggcgtgaggacgcgggtcccgcccgagctagggggcgtgaggcctgggtggggggtgtgcggagagcctggaagggctcaggggccgagcgcgctcgctgcacggccggcgctggggtcgtcgcccccgggattcatcttccgggccgtggctggcgcggcccgtgccgctgtccgcccctccccgcgcgctcctgccccgcgccccggctacccgtgagaccccgcggggccgcggcgcccccacctgcccgcctacctgacacagcaaggccgagagcaccgccagggccagcgcgcaccgactgcccatgctgcttcgctccacgcgcgagcctggggggcccccacttctctccttagaacagcggcggacgcgcgggggatcgatgggccacggggagcgtgggcagaaaagcgcccttgcctcgccccagaccgcaggacccaggacttctttctttaaaagccggtctccgcctcttcccaaggccgcggttctttatatccgccctgcgaggtcccgcggcagccccagggatgcccgaggaaaggcagctctcgggggacagcgcggcggcggcgactttcgttttcctccttcctcccagcccccgaggaggtgagggtcgccggcttcctggttttgtcttgagcttcttcgcaggagagggagggggagaaagagaaagagagagagtccagagattgagcttaattcccaagagagctgcagagcttcctcccgagccgattagaaagccgcggtctggaaatcccacgggcaaggcgataatccggggccagcggcgcgcgctgaggggacggtcggcggcggcgggtgtgcgcggcggcccctgcggatcgcggcccggtgtcactcggcggcggcggtcgttccgggagcactccgggctccgatctccggtgtcacagcaaagatccgcgtctttccgatgaatccagccaatgccatccagtacacacgcgcaggaccggaggggccgggccgtgggaggaggctctgcgccgcggctgcccgggttcccctgcgctctgccctcggccgggtcgggtctccgcgggtgcgcgcagaggatctggctctcgccggcgcctgccgcccttatattcagccggccgcccgcatggctaatgagatgcaaatcagcagccccccaatctggcgagagctgtcacaaaggagccacttttccaaaccctcctctcaatggatcgccaaatggtcagtgagctgtaaaatgtgcaaccctcctccccgcccccacccttccccgcccccccagtcctcccctgcccccgcccccagcccccccttcctccctcaccacacaaaacgcactcatttacattcctgcaaaatgttcaccgcaagaatccccctgcttctggagctggtgccgccgccccgtcccctccgcacgccctcccgggccacagacgcccagagaccctcggccacacgcggggggcggcgctgcgggccccacttgagcggcgggacgcggcctccgaaactccgggccgcggcggcagccgaggggtctccttgcgccgacagcgtcccgggggcttggggagggcggctgcgagcaggaggacgaagttcgaggcccgagctcttggcggggccgccccttcttcggggcaggcgcttcctaaggaggagtctcttgggggcggaggcgggggtggcgattcggggagcatcgtaggaaaggggcgggcggagcggtgggccgagggctgccagagcgaagcggcagtttcgggaagtttggggaggtccgaggcggggacacctcctggcccaggacggcgactgagcctcggggagtgcagagccgacgcgcgggcggggccgggacgccccctgggacacccgcatccccgcgccttcggtgtcctctcgtggtccgcggccactgggagtaggggcccgggggccggacagcatatccccggagccaggagaacctggccttcaactccccccacagacacgcgccctcccccacaggatcctcggccgccgccaccttccccgggtctcggcccctctctcccgggtatccccctcggcctccctccgcctggtaagaagtgagtttggtgtgtgtcgttcgcgtggctgtcattaaggcagcctgttattgtgcgaggctgaatcagtggctctttgtgcgctcagctgtatggtaatgcagacagcacctgctccccgcacaatgcggagagaaagagctcccctccgcgcgcgcc

SEQ ID NO: 158 - DNA, 7441 bp, Homo sapiens
  source 1..7441: mol_type = genomic DNA
ggcgtagttctgcctcggagccaggctgcgggatatgtctaaagagcggtcaaaatactgattcctccaagaagcaagctgttccacactggcgggcctggtaactcttctagaaaaaaagtaaaggagaagagaacgaaaaaaataaaggaggtggaagggaggtagggagagaagaggaggaggaggcaggcagagagacagagaaaatgagagagaaagagagagagagaggagagagagacgagacagagagagaaacatgtaggtaaggtaaattcccctcaaggcacatagcgtgccttttcaggtctagtctcccaaccctggaagagccttctgagaaatcctcagtgacaggatataattttttatgctctaatctacccccactttaagaaggctcttttgtcacatttattgctgctgacttcctagctgtaaaatatttcacatgcatcttgtaatttccaacccaacattttccttcgtatcctaaggaaagagagtctggcccactgaaggacggccagacagaaagacacctacaattcaggcctgggtctttaggtgcagtgcatagctctggtcatgctgttggtatctacatgcaggagtgcaagaagaaggaagggacacagggcacagctgcagcaagtccttcctctctgtcccaaagaaggcttcccaaaggagaaatcctagtaaacagattctattttgcatcatttagaacctgtttgccactgttttatgtaaaagcaaaacagaggaagctccttcctgaaaaaaggaaggcgggaagggaaatattaagagtattatctcacacaaaatgaaatcaacacggcgccacaatgctttcattccttcctttccccaaccctgaagttccctcttcacaatatctgcaatgttttcatctctcgaaaagagccgatacatttataatcatactccaaagagtccaaggttctatcatttgccatgctccaaacattttagatttttaaaaaatgtaataggtgtgaggctagatttctttttcattttctcatctctggaaactccctttgaagggtaatttgtctaattgctctggcactacacagaggctgatgggtgggggcgcttctccaagataattgctttgagcttagaattcagaggggttattgagggatttctgttgccttctaactcacatacagggtgagagggatgtatttttatttcagcattactttctacctgaaacaattatgagatatggcagtactataaacatgccatatatattatatatatatatgcacacacacacacaaagtatagcattgaacatatatacatatacagtctgcatgcatagagccccgacttctgttttcttttttgccttgttggatctctgcagagcttgtccttctttagttgccttcaataaaacttcactagccagttatcagaggggcagaatgaagtatttttcagaaacattccgcttttcatggtcgaaataattttatttatccagaatatacagtttaattcctctatctacacttatttacatggctaaaataacattgaaaaaagtcttttgaaaagttgaggtcatagatttcaaggcaccattgaaagtgtccacagttgcgcaaaaaaagtcctctgtaaaaaaagggggggtcttttgaaatgcaataacttacatgcaaaaaaaagctttacacatgaatctttttcagttttccgaacttccccatatgaattcctttctttatgattttctagaacagcaaaacacagtagtcccaaaaaagagagtaagagagagcagcccatctaatagagtgtcccggaggccagcgccagcgggtgctgtaaggagcccggcggcggcaggtgggaattgattgagctggctgcacttgtgtaccaggatgcagagttctccaggtagctggacgctggggactggttggaggtcggagggtgggcatgagggtggtggctgagcgagcgggacgagccctggggctcccacaccgctggagactgcggcgagttacacgccattgggtcgctggagctgggactgtgctccgggggcatctccccgtttttcatgatcttcttgatcttggatcttttgttctgaaaccagattttcacctgagttggggaacaaaggcacacgttaccgggacactcagaggtcgcccgcgccttccccggggcggcgactggaggcatcttcggacctctgggcggcccagccctgcctggcgtctccccgccgcttgcggcctaccgccaagaagctatgccttaggcaaaccatggagctctggccccagagggcgccctggccggctcggggcgccccggcccagcgaggccacgaccccaaggcttgtcttttgtttgggctgggggtgggggacgccagcgcggcgggtgtgcgcccgagtgtcctcggcggcggcgcgcctcgtgtaagcctgcgcaggacgcgcggaacgcggcgaaggtctccaaaacaatcgcgcgagcccggcggggaaggggcgtggggcgggctacgcgcgcctgtggtcagaaaaaggagcgagctcccaacctcccgtcctactcccttcactccctctgcagctcagagaggccagaatctgactgcagctcttggcggcgactcgaacattctttatgcttccgtaggccccagctgggttggaggagtaaaaggaatgggacaatccaggaagacttctcacgtacaatagcgccccccacctcgcgacccttcggtggccgtggcctgaagctcccgtaggctcagggcacgacccttcagtttctccgctccaggcgacgttctcagccttttcttagcctgagaccaccgcgagaacaccaggccttgctcacccccgaggaggctctacattgttaagaaaaccagatagctgctctgggctgcctaggccgccctagaaataaccctccgcttgctttcaacccgcgaaattggccccacagctccggaggcccgctacggggtgggggcggggggcgcggttagtgggaggtatctccagaccgctgatgaataccatccccaccgtctcaaggcctgactcaccgagttaaagcataggggctgatgtctttgggtctgttagtttctcacgggtactgtcaaaacagctccagtcccatcgagactgaaccgcgcgacccaaccagacgtgcagctcaggcaggtctagtgcatggcagcgccgtatttacctgtgtttgtgtcaatcccagcgaggcggccagctcggcgcgttccggcaaggcgaggtactgagtcttctgaaaccttctctgtaatgcggccagctgaaagctggaataaatagtcctgggtttacgaactttctttggtttgccattcaccattctcacctcgggctcggtcacttctttctctaaataatcaaaacagactcagttaaagcttgtcaccagacaatgccccttttgcggaagggcctcaaatagagtcctagagtttcttaccactcagtcttcattctttgcccatatcaccaccacctttgcttttcaggaccgcgataaatatgcacctaccccaaatatggaaaagcgggatagcctctgattaattcctactctgttcattcagatagtttgtgcaaagcgcttcctacaacactgctttctccttggcatctgggattcagctcttgcggtcgttgcttcttctcccggacttgtttttacgcccaccctgtgctcctccgcgtttccgcccctccccaggcttcaagaacaccagcccctccccaggcttcaaggaggtggccctgggccgtgaccctacttctgtcggcgtctgttcgggcgcccgcagaagccagactcttgggcagggaagacgctaaccgaggtctccaaagttcaaagacccacaagcaaactgctccttcacttcagcagcaagcggtcggggccgccgcagacagagggtcgattatgcaacccccataatctcgctgcagatctgcgagggcacagatgtgtctggtttcttttacaaatagacttaatatgttcttggcaaaaaaaaaaaaaaaaaaaagaaatcttccacttatgcacggaatacagagagagtgaaagaaacgtagacacctcaacccggggctctcttttaaagttcagcaagagtcacacactgagaaggaaccggtggtggggtgttttcgtaggaaaggggcggcaggtcaggatgagattctcactgtcatgagtatgggtttgggcgggagggggagggattgccaaacgcgtgttgtacaaacctgccctggggctacaactccccttcctcaaaactaccacccctctggaactgacggagaacctctccagggtgtgtgtgtgtgtgtgtgtgtgtgtgtgtgtgtgtgtcaagttccagggagaagtgtggaggatgagggctgtggtctcaattctgccagagtaggggatgctaatattagcaggattattaatgtgctggtgggaagagatcaaaccttaccaataaaacctctccgccgagcctcatgcctttctcttaccgcccaagctcactaaccctcttaaactctctaagtaagtttcaaagcggacgaaaaaggaggacggaaagacaaattgtgggcgcctatggagacagaaaaaaaaatctatcctacaacgtgacccctcagcaaccctcctccacctttaaatggctttttgtttttggaaatgcctggataaaccgcaaaactctcggcgcgctcttctctggctggctacaactccttaacccccccacccccacccagcgtgctcagggcacccgcaccgtgctagcttgtggcggctctcaaactaatcctgactgagtttttgaggcagccttctattcccactcgcaccaacccagcacgcttaccaaaattcccaagtaaccttctctttgttacgcaaacgccaggagctgcttgattctttcttctctccacccctatcccctttccagcctagccggcttcctggccgggcaagctgggaattcagcgactgaagggccttggaaggtgccggaggggagagacgctagttcgaacctccacagggctctcctactaaaaatccctaaaatgctggcccgagaaactctctttgttggagggtctgagtcctactcccttctgccgcgtgcgcccccactgccgtgaaccgctgtgacccccaatctaccaccccatctcgcgcccccagcgtcctagtcgccctgtatctgcccagccttccccctgtccatgtacctggctggttggtggcgcttgggacgcggttgtaggcgccgccgtactggtggtaggagctagcgtagctatagtcggcataagctttggctgggtagctcccggcggagccgttcacgccgtgatactgatactggtaggggttgagagctttgccataggaagccgaggtaggagagcagtagccgtgcggggctccccccgtagggctgtagtagtcagaatcggtagctgaagactcgggcaaagttggcgattcctgagacggatggtgcatagctgcggacgtctggaacggagcttggaagtcgccggatcggatgctggggacccttctgtcaaacactcctgtcatcgctcacgggcggcggcagcggctgtccttgctgttgtggcggcggcagctgccctagttggctgtggggctgctctggtctaagcagacatggctgtgggagcgagggaggaggaggaagaggaggaggagagaaggaggaggcggcggccgcggcgaggaggagactgggagtcgtgaagtctctgtctccggccggctgactgctggctgaggcgcagcacagccttggttaaatccttaattgcgcgcttacgcacagcggggtggatctggttctattggccagggcctcgggagcaacagtaacaccctaactcgtccaactagttttagcacaacaaagcattgcttaaaaagggggtggggggtactgagggggtgtgtgtgtttgtgtgtgtgcgcgcccgcgcgcttgtgtgtgtttttgcttgttgtggagtggggaggggtcttagtctatctgtttttagtaaattccaaagacatcgcagaagccacagcacaaggctctgtgatgtctggggacaatgtgttccaatcagaagcctcaaaagtgcacatgttttgggaatgaggtgggcgaccatctttccttgcttcccactaccccgcccccgtgggctgcaccaaaggcgagtgtagaattaaacactgatactgaaatagggagtcaaggtgcagggagtggggagcggggggatgtaggatggaggcaagaaggaagggaaacagcattttttttttttttagtggagtgttgggaagcaagttgtaacttacatgttttgaaaatttgctctttggggaaagaggcaacttcctttgcaggagatgagtatctcccggacgcgggctggacaggaatgcccaagaaggcacaatgtccattaagccggtgaatggcagggagagttcctgcagcccaaagtccttataatgacttttaaaaattactgtcttaaacacatataacttaaggaagcccaaatcctcgttgctggcttgcaaaaagagccaaacagctccacttctgtttaatattttcatctattttcaagacattggaataaaggctctttaactatgttcagtggccaaagactcccgcaaaggtgaatggatccatgtataacctgccatacctccaggaaagaatgggaaagtctcggaagtggggaaggagacaaggatcaaagcctttgcaaagtcagatgatgctcattgatttccccctcctggctccatgaatgtggcccagtctctccatttcccagacccgggtttctgtaccctctcccctttatttcctgctgcaaagacatcctacttagctcgtatgcaagggaagaaaggattcaagaatcattcagttgatacacgagatctaaactttgctcttcaggaggtgctatccttgttctagtcgtgattcagctgggagtttagaaattcagcataaaagtctctcccaatccccattgttactcccctcaaataggcaactccgcggactagatcctgatttggggccttcctacatcttcctttacggggtccaagaccggcaatctgggagttccacaggctatctagggttatctggcctcccctccgttttccctcctaccgaagaagaaagcgtctgtgttagttgtgtctagtattagtttagccttacttggagtgtggagccactcggcctaaa

SEQ ID NO: 159 - DNA, 48550 bp, Homo sapiens
  source 1..48550: mol_type = genomic DNA
ctgctgcctcggcctcccaaagtgctgtgattacaagtgtgcagcaccatgcctggccctgcataattatctgatgtgtatctcaaggcactctaaaagttgcttgagtagaatggggcatctgtctgtagttggttaccctgggacatgggcacattcccctgggatatcgttgattctttccaaagagaaagacagcagatgaaagaaattagggttttgtctcctggagactgggaaagtctcaggtttaccttgtatctccaaacctagcacacacctggtacacggcaatggcatatgctcaatagaaatgtgatgaagggaaggagagggagaaaggtagcggggaaaaaaggaggggataaagctcccatatgctctacagtgtatattcctacaaccttcctaactccaaaggggagaagcagactcactgtatcctaaaacattgataaaacacccacttcagaaaaaagtaataacaatcaagtaactattgaagatctatttgacctaacagcatagaaacagaagaattacacactggccagctgtagcgtagggcctgatcttaatgttttagagctggagaggcctggagtcactcaagaggcatccaaatggaatgtgaaatgacttacccacagtcacatagcttgttagtattagaacacaaactaaaacccaggtctcaaaattcccagcccagcatttttcacgctgcagtttcctatatagaacagaagcaatagctgttcttgaatcctatcccttcctgtttcctaacccaagtcacttcatatgtccttccgcagaggccctgctaaccttaagccctttccctggtaccacagaactttgtacaacttgctggggggaaacagcccatggtcatacgccatttatagaatgcaggcttatagaacatggtcaataggaatgattaaggaaataggaattaccctaataattggaacactggctcaattatatctttgtggccatttgttagttgtagccactgttcttcatacctaaggggaagctacagtgtaagctccaagggggcaggaaccatgtctgtctagcccctaagtctctacagtgtccagtaggtacttaactattagttgtatttttaaacatgaccaccagttccatatttcatgattccaagcaggttccatcatggctttatctacaaataaccagcaatgtcatcctttagccaaatatttttgaagcatccagctctaccttgtgtctccaataatctaatgaactcaacacagagtctgaccaccaggcccataggcaaagagttcaagttccatttgacttgaactactctgtgagcaatgaccctcacccccaagtgaacgaagactccctaagggctcacattatagaaatggaagatagatagtctgccagtgtctttattatcaaagccctggagtgcagagaagagacatgtagggtaatgaattggtgtctccctcagaccactacttgttcaatctttattagaggaaaggctgacctctgtatgggcaagaaccaagcaggaagatcatgggagcactcagcctaccctctgtggtcataaacaatctagctagagtccctgttttatatatcctagtaagaaaaacagaaaccctgaagtcaaacagcatattcctctatattctgattatgccctactttctacccctaaggaatttaacaaatcattacttccaaccccacacagaatcctccctgagagaagagctggtaaatatattttccatggatgtgttagcctactattgacatgttagtgcccttatagtttagtcctccaagcaattgtccagttgttttgtgtttaatctgaccctgctgacagtcattactcaaaatgaagaaggcaatctagagagaaactgtagctgatgctcctcttctctcagtgggtggacagcccatccataaagtcttcttgatgatggtgtccaggagccaggatccaaggagctcaacaacagcagtgggaagaattacaggaaaaggtcatgctcctccaagggagtgggttttcctttgtctcagcaactgtaaaattataaacaaaagattaaaaagctaaatcactgctcaagtaaggatcttggtaaatgcatggtttactcaaagcctgatgacggattcattggcatctaaatgaagtctgtggttttccagacaatggggcagagactacagaaacacacaaattatgcctaaggattctctgttccttcgttaattttgttgtaccaaagaaaaaggaaaaactataattgcaactaaatacaagtaaatgcaagtaaatctgcatgcataaagcatgtagaatacatgggctaggaagggatatactaggggaaaaggagagagagcacaaagaatcaagagcaaagaaattgcttcttcccccacgatattgcacagcactgacctgaatggtacagcaattatgcgacctaagtgagagttcaataaataacaatatctgggggcaaactgagagttaagctcccatgaaaaggtagaagcatagtaaccaaagccttagccagtccctgggcaatcaatatgattgatacccagagtctttaacagaatcagataggatgataataatctcacccaaagatggtttaaatgaagcatcactagtttagggaatttctaccaaaaacatcaaaagtgatggtgatagcgccattatcagagtactggcaaaaccaccaaatcaatggctgtcttcggctgccatccctacttaggggggcccctctgtccccttcctcaggaaccaggagcccagcatccatatgccatcatccacccactctaatttctttaatgcaacagatagtagctaaacagaaagtcttccaatggctagaattgggtatttcatactagggtatgaataactggttaatttgactttatcagcaccataagacagtgcaaaaaaaaaaaaaaaaaagaaagaaagaaataacaattggtgactttcacactcctacgaggtatctgcaatttataaatggagcttgtgtacataaaactcttagttactgtaatatgaaaaaaaaatagagagaaggaagggacaagtgaataaggaaagagcagggccttcccatgcttcttgtttaatgtcaccaccatcccacaccaaccatcaaacctccgaacatgggcttaggcaacttggcctccaatgatactaaacagctgctaaccccagtcttagaagacaaatccgtcctcagagcacacagaagagctgggtcctttagaaccgatgactggatttatagagaagcctcctacagatatgagtgatcatgtctgcattgctggtgtctaccctagtccaaatctttcactttacaaagaagcaaagtgaaaggtgagtggcttgcacagtgtcctgtagagactaactaaagggtagaaccaggactgagcccaggtctcccaagacccagtccacagccctatccaggtaaatccccatgagcataacacactgtgctccagacacaggcagaagatcatattcctcaaactctagagtagtatttgggtagtatctgggtagcaatttccccttcctggacagcaatttgattcagtgggtccgggttgaggcacagttatctacatgttaacaagctccatggggtcttccaggtatagaaaccacccctacacttggtcacccctctacctaccagcactgcacagagggctgagaggtccctatgaagggactgctatggggacatcctctggaacccatacatcaaagggctcctgaccactgggtcacaagtcagagccctgaaaacaaacaccagccttgaaatctcaaacaaagaatgcttagaatgggacagaaaggtctcctcttagacctgttgaccttagtggctttggtcctggcaatatccaagtgatgccttcaagcctcttgtgtaaccaatctcccaatatgtgctgagcccctactttgtacaagactgtgcaggggggctaagatgggcaaagaaaagtaagccctagttgcaaaaactctaccaagaagatcagacacgtacactgaaaaagaacccacgttacagagcagtgttgttgaggatgaaacaaaacacagatccatatctgtgtcatataagcttgctcgatgtaactcaacaatttccaaatccacttcctggcagaaccatctttcctggttcctcaacccccaccctggggattctgattcagtaagcctgaggaagagcccagaatgtgtcttttttgccagctgtgaggtaaatctaaggtaggcagtccataggtggacatttgagattctcacagtgtgttgagggtcaggctgcaaagaatttaagggaatctatcttggttccttctttatattaatggtttgctgctcctcaaaattcttaacttactcacattggcccctagaatctaagtctgtttggttttgttcctcttaggtcagtcatggtctatgctgtcttcctacttgaaacttcctacttagggcctccttcatgttcccagcagaaatctgttttctggaaaagggtgcagctttactcctcaggaaaacacacaggaaaaaaaaaagcccatgtccagccatgtatcatatgattcaatttataccatttatattgaatgtctagaataggcaaatccatacagatagaaaatagattagtggttgtagagggctgagggaagtggaatggggaacaactgctaatgggtatggagtttccttttggaggtgatgaagacattctggaattagcggtaatgactgcacaactttctgactatactgaaaaaccactggattgtatgctttaagagggtgaattttatggtatatgaattatatctcaatttttgaaaagcccatgcataggtaacacataaaacatacaggtgggtcacctggctccctgggccctcacaactactgggtgatgacccctgggcaagaggcagggcagccaatgacaataactaccattcacttgtacttattatgtggcagacagacattcattacacacagtacatggttggctcagtacatggttatctcagataagacatcattaccaaagatgtggatattattatgatgatattgttatcactaacattttaaaatatgacaacacgaagccatagtgaagttaaataacttgaccagtccacagctagtaagtggcaaaactgatagctagggagatgtggcttaataggcaccaaaagacccctgccccaaaccttgccccaaaccatgtccctcatggatctgtcattcttatcattagatttgcggaaagtagaataataataatggtggcaataatgttgctgagatgtattgagcgctttccagaaatcatcctcgatttatagatgtgaaaactaaggcagagaatgtttaagtaaattgccccaaaccacacagctaataagtgatggagccagaacttaaacacagaccctagtgctaagctgctcagtcagagatccaactcagatgtctgcaggagcaggacaatgatagtgtcaagtgggccccatatagcataccttgaaatacaaagcagtattgactcatctttgattcatctatagacatgtggtacaattttctcctaatactaggggaaaaaacaaagcacaagatcagtgataaatggcaaatgatgctttgcctcaatgttgaggatgcaaacacgagtgcagaaactatggcaaattggagagagagccacttcacccaacagggcttccccattccactgtaaccctccacctctgggtgggtgtgcagtacagtgttgccatattttctgagataaagccagaaagacagatctttacagaaaatctttttcatttttaaaagatagtaaagaattctgcagactacattggtctgtagcagaacactcttgacttcaacacatagtaaattgcctcctcaagcagttctatgtgactgggatttagaatttggggtgaaaagtgacagggtgagtcaagaacagtgaggaggagccagggtctgaagactcttgacgcacacctaaggaagcagaactttattttctaggctagggaaagccagagctttgctgttctgttttaagaagggaaagggaccagatcacaaagacacctctaacgatgtgaaggtagaataaccaggaaagatagccaaggcagtgagaccaactgggaggtaactgtaattatcagccccaaactaaggtagtagcaatggaggcaagagcatgtactcaagtcaacaactaatagcaaagatcttccctgatagacaatagatgtgattgtatcaaaagggggcacacatatactctattagatagctatactggtagtcccttgatttttttttttaaaaaaaacactatcataaggaagagggagacattagcaaatgtgaggaagagcactatgagagaaatagagaagggttacaggatacaacttgttagaggctgggtttggcatatgaaagggaaagaaaatgttcttggctggagaagagacagctctaaaactgcctaggaaaacaaaagtgaatgagggaaataaagaaaacacataaagagttcaggtattaagaaattaagaagaaatatggaaagccggcagggaaaaaaacaatcaaccaatgaagaacagtgaaggtccctaatgtccagatttaatgcagatgagagaaaccagtgaaggcattttaaaaagatgttgtaatgaaggcaccaagaagattgctttaacagagactgaactcaagaatagagaccacaatggaggcatttataaggagtagaaggaaaagaagaccaaaatatgggaaaggattttagtgattggaaactcacaggcaaagatgagtcttagagatgtcagaaaggaaaatatgacaggattctggaatattctcagagtgaaaataaggtctaatctgtaaaatatacaaagttctctctccacaagtgcttaagaagcagccctgaggagtgccaaagataacaccaaagctgcattccgagggcatgaggaggagaaagcagttaccagcaagtccctgaagggaagggagcaaggattttagccctcaccaggcttggtttcattgcttgtaacatcatccaaatcagaataaagcgttcaacagaatggacttttccagaagtaaccttgtgatggctcagagcattctgggagagctgcaatagtcaagaagactgaagcaaaaaggaaaagcctctgccacacacagtgcagagatagaggaccaacaataatggcaacaaaatatcatattgaaaagcattaagttgtacactaaaagggaagaaatataaggaggtaggaggaggtaacatcattgacaacaatgtgaaagggctgtcatttagaagtatgtcatgttatgtctggtatcttacatacagtattccatctaagcctcacattagatatgcaaagttactctgttttgcagaaaaaaaaatgtagaggctatgtaaagttggttatttgctaaaagtcacttagataataagttttagaggcaaggcttgttggagtctcaaacttatgcatttttctactataccacactgttggactatggaccatcttccaatcagattactgcaaaagccttcctaactgatatttcaccctttacaattctcctttcactatgtaactcaagtaatctttctaaaatgcgaatttcatcatggtgcttccctgctcaaatccagtcaaaaaattccttttgatcttaagatggagtccaaaccacttagcattccctacaaggcccttcaggatctgtccctactcaccttcccagccttatcacaagctcctctcattgcagctgacaatgcaatgactcttaatatattaaagtccccggaatgcaccctgctcattctcacctccaggtctttgcacactttgtctcttttgcctgaagcactcttcctgacctcctaaactctcccctcagtcagtcaatgcaacagcttctcttctctcataaaatttaacacactttattgaaatcctctccaccagttctgaggtccccacacctcctaactgggaactacatgaggaaagatcctgtttctatcttgttcacattcacacccacctagtagtgccctgacatatcataggtgttaaacacatatcttttgaaatggattaataaattggatgcagtggggctgtcactggttactaagttaaactatgggtagaggcaaagggcataactaacaccaaagcctctacttttaatgtctgcaatttactgtctatagctgaagattcttttcttaggcatctcgaaaaattcaacatttaggctgggcctcctctggctcacacctgtaatgccagcactttgggaggccaaggcgggcagataacttgaagccaggagttcgagaccagcctggctaacatagcaaaaccttgtatctactaaacatacaaaaattagccgggcatggtggtgtacacctgtaatcccagctactcggaaggctgaggcatgagaatcactttaacctaggaggcagaggtggcactgagcagagatcatgccactgcactccagccaggtgaaacagcaagactctgtctcaaaaataataataataataataataataatctacatttaacagagcatatactctatgcacttcctgtgctcagagctatgagtaattctagggacaagactcagttcttgccctaaacaagcttgcagtctagtggagtagccttcatattccagtgtgttacaattcacattctctttaaacctttttagaatttagttgacaagggatccttgacagtctgttaagcattgggtaactgccaactgactgatcactagctccaacaagactacaaggggcttgagattcgagactgaatcttcttcatcattatcatcccagtgcccagcatagtggctggtatataaaaacaggtttaaaataatcaactgaatgaatgaaagaatagacaaatgaacaagcaaacaagccaagtcttggaataaagctttgggatctgggtcagagtctcagcaggaattattctccatcattcaacagataaatgactcagcaacaaatactctagggaaaatcagcccattcgatataaacacacacagagacacacacacacactgcagagccacaggagtacgggagcaggacaaaagagggccagggtaggattttggatggttttccagtgccagctcaggttcctcctgtgactttaggttcagaagggagacactatggggcaggcacacacacatagagcagtgacatggcttcatctgacccctacaaactcaaatctgcttattgagacacaccatagcgataaatcaatggaaaaacaggtagatacatcaatatagtgctcatcacatgttttcaaaacttattaagaaaaccttaatttcacatggtatttaaaatgtatgttaataatcaccaacacaaataaataccctactgaaatatctgaatagttgctatatctttcaaaattaaaaccaaatatcagaacaaaaatagctacctaaatagcaaccttttcacacatacacacactcctgaaatttacctgctgccaacttgttatttaaataaacatttctgctacactttaccaccaaatagtaccttgtagtcagtttaaaaaacctttatcaaagtaagagtatggtattattttgacaccagacagtcctttgcttttgtgtggaatcactgtgttgcctgaacagtgtatgatttcgtttttgtgcagacaatcagcaggtcattagtgtaccatacaaatcgccctggactcaggatggagccctggggaactgaagctgtaatagactggagggaagatatggtgttgctgacagttacctctgatggcagttaaaaggtatgattgcaaccacatgacagcttaatacaacagatccctgaattgttcacatggcaaattctgattaatggtgtcaataatcattataaatttttaaagttttgtagaggactccattatatcctactatcagaatacaagaccaaccagatcccttatgaaataaccatgttttatcattattttactgccattggttttacatgttggtgaacgtgaatttattcacatatggaaggtggtggggggcaggggtctactgcatatttacatggttcatgaagaaatttttgcataagaaagtgaatgtaagataaattgaaactcagtatatgaaccagaatttgccactttcacacacacacacacacacacatatgcatgcatacacacagagatacacacacaggataaggtcaatttcactgtatccacatctggcaatgatgtgggcatagtgaaaagatttcaggttccctccagaaagcccttaggttacaagaaaaatcatcctacatctaataaacccatcttagatatatctcccatatggtaaagccctgttttgctttattctaacaaatttgtccttggattcctctcacagctgttgctgctattgtttatgatgtattgagccctggcagtggagtgatgcactgtgtacaacagagtcaagattcccacatcactgggctgtgtgagcattaaatgatctcacctgtgaagagtccagagcacccagtatatttaggggcctgacatgtaataactgctcaaaaaatggtgccaaaaaaatttttttaactaaaatattctaggcacttagtctcaagaagaaaaaacagagtaggtttctaaaccagattaccaccaaggtaataaggatgctaaaacaaacaaacaaataaataatccttcctcacaatttccccctcactattttccaccacagtttggtttgacttgagaaacactggagcctgtatgtgcccagcactgggctagcactggaggcatggagatgactatggccaccccccagctgtgggtggctgcccctctgctggagacatgaaacacctgaaattctttgaaagctgagtcttttgccaccacaacagtatttagaaaatttattatacaaattcacataaatgatataatcctataaaggaagatatttgctcctgtaacacttactatttaggtcagctgactttttcatattctggtagactcctccttaatgtatagctgccatacatacaggaatcatctttttattttgcaatgagttacctagcataagtgaatgattcaaatgtgctaaaaatcagtagactaaattaatgctgattaaaagagcctatgatagcaagcctatagatataattcttgtctataaaatatatcatagctattaccaaagaaattaatctaaaacttaaaattaccaatactagctagatgtcaataaatattactaatatcaacagataattctaatccttttggtctatctgcatgggtaatcttcaggcatgtagcctgcagatttcctcaatactttgagttgttcaatatcattactaatgtttggaggttccccaccccaaggatttccctttccatttctatcaagtttcagcagatccttttctgaagtttaagtaagacaagcggcttgcctgttccatatcaatttgacttggaatttagaagctaacccttcctcctcttcctcttcattttccttactttactagcctcatctcccttgttttactttcttctcaagttctttttttccatgctttaagtattaatttaaaagctcccctttcctatgctctaagaaaaaagaatagcagaaggaacagaagacaggtttagaagggtgatcaaacatgaagaaacaagaattttgaagctcctacgcctttgaagctcctactcctttaaagctcagcttctctctccgcaatggccaaaaacagatggacattctagaaagactaaaagaaagaagatgctaggtaggaggagacagaatgttgaagggaggaactcatctcaagttcttccttcttctaatctcttctttccacaactcatatgcagtggcctttatgctcctagtggaattgaacccattgaaagttcagtataaggctgggtgcagtggctcatgcttataatcccagcactttgggaggccaaggcaggtggatcacttgaggtcaggagttcaagaccaccctggccaatgtggcgaaaccccgtctccactaaaaatacaaaaattagccaggcatggtggtgcatgcttgtaatcccagctacttgggagcttgaggcaggagaatcgcttgaacccaggaggcagaggttgtagtgagccgagatcacaccagttgcagcctgggcaatagagcaagactctgtctgaaagaaaagaaaaagaaaaagaagagttcagagtaggtaaaagggacaaatggcatgaagtaaaattccactcacacacacacaaaaaaattccccagggtgcctctagataaattgctcaagtgttgttctccacccctctcccaggccaacacacaacactaggccacctcacacctgaacttctggttgagccagaagagcactagaagtctgagggcagggccagaagcccagcagagccccaggcagtgggcccagccatcacctctgcagggctgggactacatttgccccccaaacaaccctcagaaagttgggtaggaggagcagtggggaaggtcaaaggcaacttgggttggcaccaacgaggcctcactcaccttccaccaggctccaaccctggctatctcagatggtgcaagagtcttctaactctgtcttccaacttccagttaaaccagaagctggacattcaagggaggggccaggaatgtggccagccaggtacagggacattactgccacacttcccatcatggcccacaagtgagatccaggccacacaggtgtacttgttggacagaaacattctgagattctatttaaaaagtcttctattccagatattaaacaatcatgactgccatttgctggccgcttactatatatggcctggactcaccacgaaataggtcatttaattctaacaacaaccctatacagtagatacagtaattacctcccctttagatactagaaaactggagcctagaaggacaaaagaaagtcaattccaactaataaaggacagattcagaattccattccagataaaactgactacaaaacccacatttttaaccatcatatgtagaaaaccaaccttctacacttttcaaagtactcctcctggatgggccttcagagcactttgaccttgttttgttacaggaacagaattcaatagcaagatggcaaatagttttcctctatttgtcaatgtgcctgaggccagaagtagattctagaaatcagataaacaagtggcagagatagccaggtgcggtggctcacgcctgtaatcccagcactttgggaggctgaggcgggtggatcacctgaggtcgtgagttcgagaccagcctgaccaatatggtgaaaccccatctctatgaaatacaaaaaattagctgggtgtggtggtgcatgcctgtgaacccagctactcaggaggctgaggcagaagaatcacttgaacccaggaggcagaggttgcagtgagccaagattgcaccattgcactcctgaacaacaagagtgaaactctatctcaaaaaaaaaaaaaaaaaaaaaaaaaaaaacaagtggcagagagaatccatttacaaaacagaatttgagggagttagtgtgtgggagcgtatgttctgggctcagtctagctcagagctgatttgtctcaaggttaaagtatttcccttgccttttggggggaaccaatacatgaaaatatatcaaccatgaactttagtcacagctgtaaataaacagataacatataaacatgtgttcaagaggtccctaaagcataagcactttgtccactaagttctttattttccaagtctcattttcccaaaagatactgactgccccaaaggagaggtataataaagtattggaaacgttctgggaacttactgaaaaaaacaatagatgcaacaaatgaagacaaagtcaatactgtctttatgttcaatggcccctagctcttaaaataagcatacccttatgattttacagcagttgcaatgataaatggaattgataatttaacatatttataaaataaacattctgcacagtttttccccttccacagaggccttaagaatcctcatgattatgactttgggggcattaggactatttataagcgattcttgtcagcccaatctgcaattatgatttccccgccccccgccccagcccctgtggactctgaagagtcccctatttgtagttatcaagggaactcccacttcccatggagagagaatgacagtaggatgttatcacttagcttccccattctctcaaagtcccccaaccgaattttcaggattgctcttcctttcgtgtactatgagacaatagcaggtgttccccgcttcacccctttctattctacagactcctccaaggaagatggatgctcctctagaacaatgaccacaagaaaacaacagaagcaagaaaagtcaaagattatacctacccaaatctccatcaaaaacaagactcagaagcctgcaatcatataaataggcctatgagatgactcagcttcctaagtaatatgatttagggagaatcaaaggatatatatatatatatatatattccattacttttatgtattcattttcaatcagtatttattgagcactttctgtgtgggagttactagaagatgaagataaaatggtcatggggttgtcagatttaacaaataaaaatcccatattttatctggcaattctaaattgtcagcaagagaccatgcctaccacaaggaactcacaatctagtgccctgtgcattccctaaaattttgaaatctcattaacaccttagcaaaactgatttatctgattagcttcaaagtccataacctgaggctgggctctgtggctcacgcctataatcccagcactttgggaggcagaggagggtggatcacgaggtcaggagatggagaccagcctggctaacatggtgaaaccccgtctctacaagaaatacaaaaaccagccaggcgtggtagcatgcacctgcagtcccagctacttgggaggctgaggcaggagaatcgcttgaacccgggaggcagaggttgcagtgagccgagatcgcaccactgcactccagcctgggtgacagagtgagactccgtctcagaaaaaaaaaaaaaaagaagagaaaagaaaaaaagtccataacctgggagaatgatacacagaagacataagttttgagggaaagaaaagaattagaaaggtccaaggcaagcatcagcagaatgtcacagaaggagtaacaatgattgaccgaggacaacaaaatggccccatgtccatagttgggtggtagggctagggtaaagaaatcaaaatgaggcaactattgctgagaaactcagcttgtttcacctgcattccaaataggtgacaagttcacaaaaaatgttgtcaaggttggtaaacatttcaattagacctgagcagaacatctagtgagatctcatgccaacttatggtttggggtggaaaccatacaaaatgtggtggttttatagggtttgaacctgaaagcaagcaaaatgtggtggtttgggctgtgtttttcttggagttttttacatactcaggcataaaaattcacagtcaagcttgggaggtccaatctgaaacaataaagttttcacactatcctttcagcaaccacaaggaataggcttccaaaagaagttgtagactcttgtttgaatatcttttaactatggttgatagatggactagttaggccatgtttatgtgacaaaaactgattttgatgtttggaaagaggaaagaggtcgtcttttcctggaccaacattacctacataggaaaaagacagcaagacttttttatgcatgctctttgtgttaataataaaaccagttaatgattaggtccattggcagaaatttcttggttagcctgctgtgagcaactccatagcttgaatctaaagtgagagtgggctgaggaaaatatttgttttgtcttgtatgtcagttattaaagccacttcaaatccttcatggaaatatatgcggcataaataaatgagaagtgccacaaaagaagtgcagagatggaaaaagacattcacatggcaaactttaccatagcccatgctagtaatttaccatttcctaatcttaggattccaaatcccaaattgtattttgcccagtgcaagatacaatttctgcccctccactccttccctttctttgatctcctttgtctgagcaggcaactaaaatcttcatgaaaacatttgagtgtgaggttagcactgtcttggatgtcaagcagtacaggttctataatggcttcagagtgccttggatgggtacaagaaaacagacttggatgaccctccgcaagttctttttataactttctgtgaggttcattctctgaatctgcaaccaaatcaaaatatttactatgttctttagtttgaaaacctgaatatcccttcatcattaatagaaattctaatgttctcacaatggtgtaaaatttcattttttcttttgtaattttgtagtgctaaatttaattttcaagggggcaagggaaaaggttataaacataaattacggtttacatgagcagaacagcaggaatcattattattatcacttacctcatatatttattaagttattccaggaaaacctagttaatttacatcttgtgcctttgaaacatttgataactccaagttggggaattggcttaacttttcctttggtagaagagagtttacagatctaattaaattagctttgcagggggtgattaatctccttaaggaaatagactgctttcaaacactccagtaacaactgtttctaatgattaatgaaataaatacaaagaattctggcctactaattaaagcagatccaattatgagtcttggccacagaatattaatccctggcttatgtaaatatgttatatataatagattacaatattttataattctgacatatcatagtttatactggtcttccctaaaattagcctaagacagtgagggcttcattgtatttctgttcaacagttgtaggcgcccaagatgccagcaaaatacatctaaatagctttttgaaatgtttatgatccctccagtccctgttaactataatatgtgatgacataattggattcattggaagcccacttggctaggacattgtggtagttgaaacctattagcactcaagtaaataatccaaatcaccatccaacgaatatgcataaaccatatattgaatagtacaatcgaatgtctaaggattggacaggtaacccaacatgtttataagttcttcaattaagatagaaactcaccaaaaatagtttgtcctgaaaatgtcaagaattcattacagagcccacaatcaaacctcttcataaagttactcagggagaataacaggttccttttagcactccttcctttttttttttttttccttctttttttgaggtggggatcttgctctgtcacccaggctggagtgcactacagtctcaaacttctagctcaagagatcctctcaagtagctaggactacagatgcacacctctatgcttggataattcttattttattttattttttttttttgtagagacaggagttttactttgttgtctgggctggactcaaactcctggcttcaagcaaccctcccaccttaacctcctaaagtttagcactcttcttgagaaatactaactagagaaaactaaggacagaagaatccatccaattacaacttatttataaatgtaaaccaaacagaaagaaaaaattgaatacgtattttttcagtgtacatatactgagtatttactatccatcaggctcagttgtgagttgagaaatataaatattatgttgtgcttgctacaacttatagtttaaaaaaggagacagataaataaagcaacaattaccataaaacttgcaaaatgctgtaaaagaaataagcagaggatactacggaggcataaaaacaggcacctaattccaagcattggagatttccccaaggctaatgtcacttgagctgagctggagaggtgagaagtcagccaggtgggcaatgaccaaaggagggctttccagaataaggggatagcatatgcagaagtagaaactaaaaggacttgttaaacattacattaacgctaatattaagcattaactagtattctttgatcatttacttttcacaaagcaacttggtaagcattttacaggcatttgtctcatttaattctaccattaccatttaaaccagttctattattattccaattgtactgaaagaaacaggtttagagaagtaaaataacttattgaagatttttcaacagtctgactctaaagccccccaccgccactagactctaactgcctccccagctatgccacagtggtgcttgtctgtcctctgtaggcaatgaaaagccacacaaaaaattttaggtgaatctcctaaaagtaagcacaacatttttttaatgtgaaaatgactccctttttttggtcatttaaaaaatcctttggttcaataccttgattatgtccttgttaaatttgatttctatcttgttcagaaaaggaatcatgacttaagaaggacctattgtgcatgtgaatcacaacccccataatgaagagagaggtgaaaatgatgctgtttccaataagtagggatgggaagtgtcatgtgtcactctgatatgcgatacagaaatcaacatgagttgtcacaccatgcatacagggtaggacttatcatttatacctactcttatggaggcagggtcagatttctaaatctaaatactttaaattcagaatacttctccagcaatctttgctttttaattgatggtctttaaagggcaagatttgcttagaaccatgtttaagagagaagagtggaactatagtgatctaaaatgatctaattttctagaaaattactactttctccaagctgtataaactttaattaagaagacaaggaggtctattctctcttcttacacacataccacataccaggctcttgggatactgataaaaggaagacagtggactgaaaagattaaaatttttaacaaaactctaaatataattaagatggaatgtttactgccatctttaaggaccaaaaagtaaccaacatttgttgctcctctggaaagaaaatatctttcacttcaaaatatgggtaaagtcagcttataaagtaatctgtagaaagaaattaagtcacaagtaagacaaaacaaaaatcagctcatatgagcacaatacatttttcagctaaatatcaccaaaataagcattcctgggacacttaatgcgatgctttgtgcatctgtatccaataacatgttctcaacatctcctaaagggatattttggtagcttccactacatattctctagaacctgactttaatggtagcagatttagaagaacagataaaaaaaaaaaaaaaagaaggccactaaggtgagagcacacactgaatatgaaaatatcctccacaattcacagtacataatctatggccacaaaaggtttctcttcccctactttctattcatgtggctctctttcacctgctttctctccttgccctctttctccctaaactttcttttcccacttgagttctcctaccaaaccagttctaaaatcacttcaaaaggacatatttgaagcaaagaagtttaatgtactttgtcctacatgtaaaagcatttgggtagccttggtgtcagtgtgatttcggctgtcatcaagactggcccactgaggttaaatgaaaatcaacttcaataggaataatgtgaaagagaatagcatttttaacaaattcagatatcttcatgtgttcctcccaatctacaaattttgaagaaagctgggtggcagctacaacttcgtaagtagcctcctgtgatatgttgatgttaccacagcaaattgggaaatgaggggaaggatgtgtgtttagcacaaatgcttatgatcatgtgcacatcacttgtgttgagaatgtagctcagctatattaactagactaactgattaactatatttatatatatgggatatgggctgaaaagcactataaaatttatctgcatgtgtatatgcaagcagagagaaatgctgtattatctgtataaatatcaggtagcataaaataaaatacccctgcagttgtttgtttagggacacatttggattgagtgagcattataacaatcatctctttcagaggcacaaaaacatcacactttttagttttaataaagtctagtttttggcagttcttttatcacacctgtcatctcctaagctttgcttagccaaagcactcagacttgaatttttgaaattgtcaataaaggctttctaatctttaagtcttaaattatctaagcagattaactaccattattctatgcttacaggactccagggtaaaagacagcagagaaaatacaacttttttttttttttttaggcaattaagtccctgtggaggttgtgtttggggcatgtatttggaatatggtccaatgtgtttatgtaaataaccaaatagacatggtgagtacattaattccagtatctagatttataagacagctctaagaagcttaattgtcccacttttaaattacaagttattcttagttcatattggcaattctccagtttgcaagcaatgaatgtcctgaagccaagggagatatcttgaaggaaaaaaataaataaaaagaaaaaaagaaagctcattttcacagcagcgcctatctctgtggtgacctgatttctgctatgatctcctttctgagatcaaagcaggattaatgtgattctttactgtttgcattgcacatctcaaagctctggagacttaagaaataagtacaaatgcagcccttgaacagaggggaaactgaacttgagtggggtgggttaatagcacgaaatagcacgagggacagctaactatgaaaagttatttgggatttggaaggcaatacagaatttagagtattttgtaagcactgttgctttctcttttctcattttctggggcagtctttcggttggttgatgaggccagcactgaatgtcatcttattaatagtctccataatgaccttttagctcatttggaatgttttgcagctgctagtatgcatgaaaagggaagggaagcctgctgcatgttttcacaagaaagcactttcacattgctacaaccaggcatttataaggaggatttaaaagacgggaaaatcttttaaaatatcaaaatgttgagcttttgtgtttccactgcatgttacattactggatactggaactcctaaagggtgagtgtttcggcagcctttcagaattgcttgctcttttgttgaagaaaaggcaagtcccatattcctgggatctcagaaggcgaaaagaaaatcgcttttattcttaatgcttagtgtacacactacttgggaagggagaagctcacctcctccaaaaacgtgactgtgattttacctgcattacctagaagagggcacgccacagtgtagcccaatttgcaattttatttggactcagtactctatgggagaacaggatcgcggggctgggggtgaaggttttctcagcctggaatgtgacaccacggtttccactctcggcttatacaattccacccaaagctcaacttttccacaactctgcaagcctagccacacaaagacatccatacaacaagaagtcccaacacctgcagcccattcaaccagctgagccctgctttttcacagggtacagaatttctcggacaacttcttcatgttccctcttccaagttcttttaggttagcactcgccctgtcttttctctcaccatttcctcccccttcctctcctgccctggctggaggccacactctaaacctgtcctcgctactcggccaaagcccaggaggtgacctgagatgaaggtagtgcagggtagaacagggagagagttctctacacgaccgcacaccaggggaccgggggtccttgctgcgtaacccctgccttggcacccaaagaaattccacctactttttcttaacgtcccttataccagtcccgcgtggagccagaagatgcggggagcttggagtcaggctctttctagggagttgggaagggggtcccacgtgctggagcgccggcagccgcaacccagcacctacaccttcgcctctgcggtcctggcggcgccggcctcccactgcccaccccaagctcctacctgaaggggaaattcacccgaagaaccttgtgagttgcctcaactggaaaaggagttgggtccagaacacaattctcagggccaagaataggggagacagaatctcagtacctaaatactctatgctcgccccctaactgttttcaccacaacaaacaagcaaattggactttcttgggccgtttccttgcattatttagcttcatctgacggtgtcaactgttttctcattattatgctgaatttcttaacaaggaaattttcagctgaactaagattgtttggaatccataacaaggattgttcggaatctgtaactaggaattgtggctgtctggaagaagtcgcctgaacattctattggagaagttcggaacatcaataacaactcaccctctgcctttctctttctaattttatactattattgtctgtgcagccctggtttgcccagcggtgtcctatcacggggaaacagtcatgtagctaaaatcatagtagtgagggacccatgattcgtttaaaaaatgtgaagttttaaaatgttggatttttttgaagcttgaactactatctgaaatctcgaatacaattagtcgttgcgtcttaaaggcctttatatcattgaaaatttcctaacagcctgtataactttgaaacaaaacgttagtgttataattcaataaaagttatttaattattaaaacacagtgagggcctcgtaagttttatagcttctgtcaagacattgctaatgtgtgtatgtgcgtgtgtacatatatatgtacacacatatatatgtacacacacacacacacacacatatatatacatatacatatatatgtcaaggaagaagcaaacccagattttagggttggatctttatttaatatgtaatatctatgaggtatccaagtccagaaatcaactcaccagttctgtacaggattctgtatggagatcaaatctgggatttctaaagttaagaattcaggccttggaaatggattagattagatctacctgagcttattttaaaaagaaagagagggagggagagagagagagacagggagagaaaagagagacagacagacagaatatacatatacatatatatagagagagagagagagagagaaatagagtatgtgtgttataggctgttttttttaagatctcatttttaaatgtcctgttttggatgtgatcccttgagttcaatacatgatctttttcaacttgcaaagaatctaagttttgaggaagggaagcacaggcttcagcctctatttcatatttttaaagtcacagcacaccaactcttatatttcctaacttagaaacaaaacttaaaaggtaaatttggaaaattaacttaaaagagacacataatagaggataacttatctatatctatctgtatatctatatatctttacagaaataaatgtttttaaattagtaaagatctaagggtaattaaattatatagtatcctgaaatacataacatgggaggagggccttaaaaattattccatctagcaatacttgtatatacacaactagtaagaagtccataactatcaatagccagcagtgcttgcaaattatattgaattgaaacgctactgaaagagtttatctttcattgtagtttggaattgtgtgaaggtatgttatgtacatgatctatgtatatataattcttatactttatatatatttagacatgcacttctttttaaatgtttatgtggttagtcactttaagagcatcaaaataaattgtgcgttggcttacactatctcccagatattcacaaacactgatgaacaaaaatctttatataggaaatgaagagctacccatttaaagaaaagaatggaaaggggaactcgatttattctcatttgtttatcgccagatttccccccacccccctgcaaattcatttgaatagctttcaagccggaaaatggaaatgtggctcctgccctctatttcagcggcagcagcagcgtcctggcaacagcgcaattttctatcatcaaggataaatggcatcgaacagaacattctgataaaaaaaaaaaaaaagaaagaaaaagaaagaaagaaagaaaaaaagcttcagcccaaggagcccatgattgctggccttcctgtctgtcatccctttacaaaatcctctccgcaaacctgagcggcatgctgtcagagctaataacgtcttctgaaggggctggggggcggggggagcacagtcttccctgcacaatgttcccatttattaaatcgagtgcttattttaaaattgcaaatatctttgtttggttcactgaaaattaaaaccaagatgtaggaagctacatgatgcgacaattattcgtgtcatatcagagaatcaaacccctatctctcccttctcctggttaaggctggatgagggggaagggggagtttgggggtattcgggacaggaggtttctggtggaaaaatacaaatcggttcgccctgcaggtaagctgagagtaactgaaagccggagcagcgatgcctgtttctaccaggaagaaagagctaactgtgattccaggagcgcgtgtgggcgcggtcctcgccgcgacgccgcgcgcgggtcaggctcaactgcgaaccttgccaccgagctttcccgcgggaggcttcgaatataaccttgcctatttctcgcctactgagatttctttccagaaaaggacattctcctgctccgaggagatggatccctgaggtccccatgcccgcacagggtgtcctggaggagtttagaggacactcctggggcccttccctgtgtagtacgcttattcccgaggtgggggctgagaatcgaagagcagcgccccccacactgggattgggggtggtcgaggggctacagatgcccgcattgggcttcttagcggcctaggctgatgcctggaggtaggggggattgggtttggctggcgactagctttaatgcccatcgagttcctgggacacccaagttcagcacttctgcatgaaaccgaaacggccagggaggggcggagtgggccgaggctgagggagcggcggtgttgacgccctcttcccacccaggatcgatcgatcggtagggaattttttatctttgggaaggagaggtgaggaagcggacctaaaacgaggggaaaattcgaatttaatatcctgtataggaggtcaaaagaaaaaaaatgatggcgaggaatgcagagggccctaaatggaccctaagatgaagtacgggtggtggctggagagctgggactggaaggtggggctgggggagacgggtaagcagcttgctttggtgaggagctcccacgctgagaacggtgggaggagggaatgatggggaaacctttgtttaatgaggaaacctaattattgcgcatctggaagtcttagtccctactaccagacgaaggcgggtacctgagggatgcagtgcgcatgcccgagccgtcggatttgcatgataaggctcgcacgtgagccaactccggcgcagcccaggctgtgccgcggccggccgccaatggaatcttgctcctactgcgcctccaggtcacattgacatctcggtttccccacaataggcctttaaaacccactttaaaaataaaaaagtgttttagtattgattctcgcctagacacggaagatgtctgtaggaaactgacacggtttagaactacaactacattactacaagcaagggttaaagtattcagaatttaagaaaaagttagaaggccggagagagggggctgtttaaagagctctggcgggaagtcaaggaatcctgggactgctgccttcggagccctgaggctagggccaaagctgaatctctctgagccttacctgtcacatgaaaatcacacctacttcattaaccagaggagcctcaaaagcagaaacattacctgtgcaggcctggcttgagaaagcaacccaaactgagaaagcaacccaaacccaccctttctccacctcatccccagccacacctggtggccagggagatggaaactagaacacctgtattccatctctctccctttcccagacaccaaagtggtctgtggggtgagggccatgtgttagctccctcctctgtgaaatgctgctaattttagaagggcagaaaagagaaaggtagagaagtggcatgaatcaccaccatggctaggcctcttgtctccacccatgctctgaggctggaaagatgagattctctggggctatagaaagggtgggccagctgggaactattacccatcctgccccttctgcacaccaaggctgctccctgcccttcctgaagcaccattctgactgttaccaaccaaccaccttgtattcttctcactatatattcctgccagaattgctgcctacacatgggcctccagcgtccctaagagtgctcataccctgtgacaagaaaaccatttgttcttactgaaataaaacatgtggggattgtcatttgcagttcctctccccttttgtgtaattcacaagtctctgatgtaggattaggcttcaaatgcatttggtcaagtacatacattttagtactcagcttaaacaatgtcatgcttaaaagcacctcagcaatgcctctgtttgtctctaggtctttgtcaccctccaggcctatgattataacatggctttttgtttcttttttgagaatgtgaaccagagccccaccccagccctccaaaatgcaagacactaaaaagtgacctcaaggtcttacctgctcatctaaaatcaatattatttgaccaatgagtattatgtcacatatcgtgtaagcatatagcttccaatagccacgtctattttcaaataaggagatacctaccgaaccttcagaaatgccagctggtagtttctgtatagaacaacaaactttctcacaatagtgttttcggattgtctttgaaaaaggtaagctttctctaaactggcccaataaaatcaaaagagtgttggcttcaattatataaggctgcaaaatgagatagccatgttgtctaaaatacttcttgaacactttggatttcagaacactttttcttataatagacttctctttgtgctttaaggaataggataatggtgtgtttgaaaggaaatatagaccataaaaaagtccattagccaatcaataattgtcacaatcctcaattaaagcaaaattatctttccttgtcctataagtggctggaataaacaaagaaatttttcttcttgaccattttaggtaaaattgaacgaacataagtctcaaattcatgtcctggtctcttcctaaggcaggtttcagatcatccataaggctaactttgatgacaactctctgtcatctctgaagaaggaaagatcagcaggctggggggtctagagagggacactgcagtgtgggctctggacagtgaccaggaacccatcattggccacaacttcaggctctggagctgctgttcacaggcatcttcaactcccacctagactgccctgcaaagtctctttgtctcacatttgtgctgacttcccattggctccttctcattccccactgtcacggctggccctcagcaccctatgccagcaaggctagttgattaaaaaactatatacatatattcacacactgagctgggagcatttccttcccatgtagcaaagcccctctgatttaagactggtcaaattaataggaaacagcaaaggaggttaaagagggaaattattgaggacaatgactgcagacatgcagtctacagtgcagagtctgccttttcctgaggattcagagctgtgcccacaaatcagatgggcggaacaatcccccatcccaccccccatgtttggggtcattagaattagaggtagcttcaggggattccctttcctctagcatgggtcagccaggaggcaagaaggaggctaggaggctggggaccctcatcagtcccactaagcctccagaaggtatcttttccatctgcccctacttgctcccccagtgggtcccgcgtgcctagcccccacacccccgccttgcgggagttattttaatgacactaaatgtgctccaggaagctttcccctctctccctctctctccctctccccctccctccctccctctctctctctctctctctctctctgtctctcttcctctcctactctctccctctctctcctgggatctctctctctctctctctctgtctctcttcctctcctactctctccctctctctcctgggagctaacccaagcctgtgcaccggagggcagctgacagctgagcgtggcgggggcggggttgggggtggggaggtggcggctgttccaagcgcaggattctggagtccaccggcgcttgggcaggtagcaagcagagctagctgcacgttgccccggccggcgttttcaaacaacttgaattacaggctacatcttgaatatgaattagccttccgcactggtgtgaattcgctttgaaactcaacttgtcaagtatggttttaattaaacatcttccggcctcgaaagattacatgttttgtaaaatatattctagcatgaaatttacttccacgatctgaaattagttttttggtaaatgttttcataaaaaagaaatacgaggtgtgtgtgtgtgtgtgtgtgtgtgtgtgtgtgtcagagagagagaagagaaggggggtatgaagtagtttatattcactgccttcctttaaaacgtcctaccagctggacttggagcctgacaggtcccgggtcccaggtcccaggcagccccggccggggcagggccaagaccgcgtgcccaggacaagtaagtaactcaaacccgacccggcaagcgtggcccaagctgcttttgcagttggggacaattgagcggacacacaagttaatcccgcactgatttgtttcggatccatctgcaggacgcctgatgcctcccccttggctgctgcagcggacacctgcctccctccccatcccagactgctctgcttgtcccatgaaagcagagaaaagaaaccatagggtgcggaacggacctcagtagtattcaagacaacacttcaccgtgaaatgtaaagttctcctttaagaattcctgcctaatattgagaacaacagccatgtcaattgatagccgttctaacagacagtccgaactgctccaaaccactctaaaagcttgccttgatggagaaggggcctctggggcctctctatcacctgcctgggggcctctatttcccaagtagccctcaaagaaaaaagaccctatgctcccgcgtaggggtaggaaaagtgcctgctatgatgggtctttctattcaatacagaattaagagttgggtccctgtggaattctcttcctaactactctctgaggaaccagccaattctgacgggatttgctggattcgagcaaaacttggcgcacatggggtggggtgtgatggggagcaggagggaggggggcgcatctcctttcttccagataattgggacccagcaaagaaggaggggtggagcggtagggagagttatttgcggtcatcaactgaaataggcaaaaccaataacgcacctcgcttttcgccctgtttactccatccccattcagtgattggcaaagcaggccctgaaggcaaaggcaataattgctccgcgctctccttactagggaaatgtgtaggcatttgaagtgtactaaaaataaacgaaggagcgagaaaatgaaaaggggacagagtgacaatttgcggcaattaaagcgtctgcgcgctgttgccggaggaacagggacccacagcggtttttgttttcccaggcttgatgatgtgactaactcgttagagaatttgcgtcctaggttgtgtgtgtgtgtgtacttgcgtgtgtgtgtgtacacgcgcgtgagcattcagcaacccaggagcccacagcaatggccggatccgtgggggaggagagagcctagaaccctaaaaactcctttggcctccagaaagaccccggtgcagctctctaccctaacccctaagcccctctcaagtgagagcctctcagttagtactcagttgccacgtctcgcaggaactttggagcaagttttcagctcccaggtgtccaacctttaaaaggaaaagcataataatactaacctttctttcacgaccacgcgaaacgcaaaggatgtggagtggggaggggaggaaaaaaaaaggggcggccagccaaatcaaagcttgggagacattttgacagtgcgcttgaaataatgctcttaatttttggaaggttttcaagaagggggtggggggcacgtgggagaaccacaactttctcctgtctgtcactcaagcggccagagagggctccaacctccagctcccgcggcaacacacagtgggaaattgcttcaagatacagtggggctctattctttctctacccctgccccgcctttcccgagcagtgaacttcacagagagggtggtaagggagggttatcctgggtgtcaaaaatctgtgcatagcctgagatcagaagagttaaccccaggccctagacccagcccagcggccaaactggcaccccgtgctgatcagcccccgcatccccatatctgcatccccatatctacctccccagtcgggggtggtgaggtttgggggaggggggcgacactaccatatgcatccaccacctaagtccagcccaggctggcttcaatgaaagctggcaaatccggcgaatctcgcagaaattttcttcgaacttaattcaattttaaagtggatttttactattaaaaacgctgccgagcaacacattgaattaatctgactgtacggttttaattacagtgagggtttctctacaaatctgtacaagacagtggctggttcttggaggatctctgcctcctgaattccattatcgggcccctggttccctgcagacggcagctcgtgggagccagctgcggtgcgagcgttcagtcgccctctgcttctgccgggcctcctggctcctgtccctcctcccttccttcatcccagccccatggagagcccaggattcctgcctgtcatttgagactgctgaactgatatcctgaaacgctacccttgctttttaaactcttgggccccagacttttgagccccctgagcatcgttcttaaagtggctcgttttgtctgggagggtgacctcttgtgtagtgttttttgaagggttctcctgcttcgacttagcagctgttagagtgggcagcgtgatgcccagtctgtctgaggggaaagcaggttaggaaatggggaggagaaaggggtagaagactagtgaagagcttggtttgggggagtctaggccccccacctccagccctacccccacccccatctccacctcctggccctagaggaaatatacatggcgtagatctgcaggtaacagggctgcttttatcagctctcattttgttcatttgttgtgcaattagcattgtagggcaatggtacctagcaaacaggaccaggtagaaaacttaaacacaaaaggaagccgactcatactcaaactcttttgtccactctcttatattctttttctaactctctttctatgtcccctgcttttgtcccattctctccttccctccgcacaaagtatgtgcgagtaaagacagtgaatccaaatatgaaccagcaaaatggacgcaacctctcaatgtgtatttaaagaattggaggctttgagctctgtcggggaagggccccactcagcagagtgcaagggatgaggagcattttggctctctgcacaaaatttgtaaaacctgccaggaaaaaaaaaaaccagtaattattccattcccagggtagtgggaagggggctctctttctcctagatgcgtgtgtgtgtgtgtgcgcgcgcgcgcgcgcgctttaaaggagtctcttttctgaacaagaaaaaagagagaaagaaagagagagagaatgaatgggcacagttgggagaatggaatgtgaaaaaacaaaaacaaccttagcttctaagggcattcaaatttgttgccctctaaaaaagttttactaaaaagctaataaattacatttccatttattgggatattcccaaataaaggagataaggagtatttatgaacaggtatgagtataaaagtcaccagttcatatatatcacaagagtagacagatacagaacaaactcaccctctctctttctcatgaaaaacggttttcatttatttttctgttataacaagaggaccaacatgatagcaaggggatgttttcatcccaggttttcctgaagagttgtcccaagcagggctgtcctttaatgttaggcattttctgtgaccttgctattgttactgctgatgaagcgatgaaggaattaaacagaagatgcttggaggcatttaggaagacagctatattaactccttattatgcctaaaaatagtctactgtttcctgttgatacttgttccctaccactataaggctgtatttatcctccaatggtcaggggtccctgctttccaaagactggcttgcttaaagctgacttctaacaccccctcccttctccctttgctctgatatatttcccatcagggcaaatatggagagctcaaccttagcatagcctacagattgaaaagacagacatcagcatttaacttgttttattctaagtgtttaaacattgttgagtcctttttttcctgggcttagagaaagaggagtgtttttgtattaggagtggggtcctatgcttgttaaaagagaaaaaagagagaggatttgaggggagagggcagacaagcagaccgacctctgtatacaatcctaaaattagggaaggtagaaacatgcgctgcttttcccctaaatcaattctgggcacagcacatcagctccctctattaagaaagccttgggtgctcacacacttgggaatggagtcatggagaaggcaaatgatgtttagtttgagaagctggttagctttgttttcataattccactggactccaagtttgaaaatgcctggagcaggagcctgtaggttgggacatgcatagttaacattctccaaattggacagtcttgaaaaactctgtgaagccccctgtgggagccagtgtcatgtcagagttttctaactggctattcttgggacctatgactagagagatgaggaaaatgttatccccaaacttaagtgagactctttctaaacatggggtaaactgaggccactttttaactggatttgggggcatctaagagagaagggtgttaatatggacaatacagcttatcaccacagacaagaacaccaatgtttccttgtatagactgatacttttgcaactcctgaagatgccatcactggcaagaggcagctcccatgtgccccagagctttcactgttgtctgtgtgttgggggaggggagaaagtcgtgcgggttaccaggatatcaggcaccctttccttacatacatacacaaacagagttttacagtatattgaatgaggaaaagactagcaagttttttttttcttcaccaatgtctcccgttgagaaggggctatgtaagtcaatactgagtaatttctttgaattcaaaggctatttatccaggtctaatttctttagaattaaagtgataactgagctcaacttagcaaccaaacccatccaggtcctgcctggtttgaatgtacttctacagcccgtgaggctgcaaaaccacttcgggcaccccaaagcatttccaggcctacatgcgtgagcaaacaccggtccagaccaggaacagcaggagattctttgacccaagagcccattcctccaacagtggcctccggcagacccgggaggtcttgtgttggcaatacacaagcatttctctctaaataacattgacactcgcaatacaaattccaacatctcaacaccttaaaaagcaaaaagcagcttaggcctcaaatcctgcctagtgaatatgaccctcacttactacaagccctaaaagagccttagggctcctactccagattgcagggtttacttttattttgaatgataaagacttcgagggccttgcccgccctcctcctcccacccgcaagggttggcccgcgttcccctgcgggcgagacaaagaagcaggagccaggacccggctggcgcctaacccggcgccggggccttgagcccctgaggtgtgcgccttcctgcaaggccccaaagaacccgagtttttgccccttgctgaagggttggaagtgcgggctggactagtgcaaacaagagtgactccaaccgccttacttcagctcattaccgtcacccatgaaaacggaatgaaggactgggaagccaatctgccgcgttcaattggagagaaatgactgtcggaagaggccctgcggtaaatagcctctgagccgcgaactctatgcgccgtggccggtggcagaggccacacctggcagccactcgtggcgcgccaccttggcatgttgtgtgcgggtcacactatctccagttttccattctcgatactggcaggaaagtctgatagtcaggcctgaagtttagattccatcccgcaagcgcagagatatcacaccaagtgggacctctcgctcgttccacttcccagcccctgactgtctctgagctcagactgggtcgcccagcaggtttcagcaggacctttaccatgcaccacaactaccacctcagtgcagctgcttcactggaacagagtgcaaggattttagccactaactattaggggaaggttgagagccctgaagctacaacccggacaatcccagccttcccggcttcctcagcaatcaaacaaatgagaaaaaaaaatccccttgcaagtagaggcagctgcactctggatacagtgctcaattgcagggaccttccgaggccctgccacgacatactctaattggggtgcagccagagttgcaggaagctggcgaggaaagcggtgcacctgtgagcataaagcgaaaaacatagacaagcacagggtgagggtgtagggggtgaaacgccttcacggtgttaacaacaagctgcagggtataaagcaataaaactgccacgtctacctgctggtattgaggacattacaaacagtctcggcgcgcagcccgcgtgtaccgagagcgcactagggttgggagtgggaaggtggggtgggaaatcttctcttttcctgacattcccttctgtcccccaccccccacatctcccccttacttagcccacctttctttttccatgaagcttttctgttgttgttttaattcattgccgatttgtaaacgtgtagatcgtgttactggttcgcgtgttaaagtgcacctcttgttaaaaggtggggaacagggcacgccacttaaaaatgaattcagagttactgaaccggctccccagactcaagaacttaagcgcaacgggctgggaaaaggagggggagaggagcgcaaacgccgctgacctgggaactcggaggaaactcgcgggcagcgagcttcaggtcttctgatacattgaaggaaagaaagaaagacagaaaaagaaaaaaacaaactgtcctggagatagctagacatccagggctgggagctgggaaaatcaattggcataagccgctgccggcgggcttcgcgcaacgtaaaaaataaagtccaagctgctccatctgcagccacccttttctggagttaaaggggcaagcggcaccttttctctatttctcagtttccttcggtcctgtaacttatggagtccagaagaagtaggatatacagaagtcctcagtagttttcccaaagggagacactgtctccttcccgcaacctccagacactgcagtacagggttgttagatattagatagtacgtttctccgtgtgggcaaaggctcgcggcttaggtctctaagcagatcgaaagtcggggtccagaccgagaggatcttcaggtctcgtccacccaatctcaagcctctggaagggcgggctgccggcgacctcctccagtcccgggacccggaacccgggaccctggacgccggtgcgggcgggcctgccctcctctgtgcctggcccccagtctggccctcctacctgttgaccaggcctgaaccacgcaccggggctccgctgtctctgcttggctgccttaacctgcgtgggtctggagaccggagggagaaaggctagatccgcagccttgggctgctccgaacttaatgtctttccccagtccatctttgaaagagaagtggttctaccacctggatgtgcggatataaatccccttgcaaataataaatggattaataataacaaggtatgaagttctttttatagaaaaaaaggagagaattgaaactaaatgcggcagttagacaaccattttgataagaggataattgaggcgacactggtgtataattagaggataatttatgctatatccacttttattccacctcccaaaataaacccagtccataatcattacaggcaaattgttctgaattttatagcagcaatttgaacaaagtactgcagttaatcatgggagatttttgtgtattcctgattagaactctaattgcctccttccagaaagtaaaaataactgtaaaacgactctatttttatcattaacaatgttgacaataaaataaaatcaattggaattgtaatcgagagacaaatttaggacgaaggcacttttacttgggtagtttatattgtaatcaagatttgccaaaccactaaccgcatgtatcatttgcatatatttgaaagcattacagtagcttctgttttcaataggaaaaaatgcattactgtcagtcctccaacgattcgttttcagaacacgctgctgcgttctgaaaagaaaaaaaagacgccccccccccccacaaccttttgtacaatatataagaaatacggcctgaaacggcagggaccgagccagaacagggtctgatttttctttttctgtaccaccccccagtggggtggagcccaggtgtgagggttcgtcttccttctgtggtttcaataaaatacgtctagaaaaatccacggtgacaaggagctcccacaagagtgtagtaggaccagagtggcagggacgtcaagaaaggggggcctggatttaatgcgggggtggggtcactgcttctaagcacaggcaacctacaagggtgcaaagggattgaaagagagcagcccccagttggctgtttcaaggctgagatattggcaactggggctccgggatttggggcacgagctgcggcgggaagcatcggcggccggccgggcagaggcgcctccctccccaacggccccgggcgccacacagcgcggcccccggctgcagctccggctgggattggaactgcggaaggtaggcgaagaactctgcaagtcgcgcacacgccagtagaagccgtgcgcctgtgacgtcagggggcgactgaccaatggggaggcactgccctttggagacaaaccattcgactcgtggcgtctgcatcaagtctgaaagcagacgcgcaactttcgcagaatccaccttaaaatctctgccttaaactgcaccagcccccaaaaaatccaaggggggaaagcaggcggggggagagcagattcccccctccccctctcctctcccatccctcctccttcctcctccctttgagttaacaaggccccgctcactatatctctttatattaaatatatatatatattagagaagagcgagggagagggagaaccacctccacccccctctttaaattcttttttttttttttttttttttttgcaaggatccaaagagctaaggtggctgcagaggggagagcggcgcgagccaagtgggggagggtggaggaaacccgggagaaggctttctccagcccccaaagtttttgatgatgaccatgactacgatggctgacggcttggaaggccaggactcgtccaaatccgccttcatggagttcgggcagcagcagcagcagcagcagcaacagcagcagcagcagcagcagcaacagcaacagccgccgccgccgccgccgccgccgccgcagccgcactcgcagcagagctccccggccatggcaggcgcgcactaccctctgcactgcctgcactcggcggcggcggcggcagcggccggctcgcaccaccaccaccaccaccagcaccaccaccacggctcgccctacgcgtcgggcggagggaactcctacaaccaccgctcgctcgccgcctacccctacatgagccactcgcagcacagcccttacctccagtcctaccacaacagcagcgcagccgcccagacgcgaggggacgacacaggtgagaggccgctggggcagctcgcttctcccgcctcccgactgccccctaccccgcccgcccgctcacttcctcgacgcccgggcctccgccggccccctcccccaggcggccccgcgcgcccttggccgggccccgtgcgcgcccgctcgcctggcgcctgcctgccggcctctcccagccgggccccttcccgccgccgcggaccctcagcttccgacgcgcagttcgggctgagtcccgggcccggcgcaggcttcgttcgacgagttagtccacactgcgctctccagcctcctgggtctgtgcgcccttttccttgctccttccctccaggctgtaacccacgtttgacccggctggggacatttctgggccggaactggggagcgtgttttgcttcccagcccacgctgggcaggcagtggcctactttgcgtggggcgccccgtgctcctcagtgactcggagggaagctggcctggctttcgctctggttaaactagtaacagtcaggctctttccagtgggctttaaagtgtccctcaccttcatccctgaccgggccccctatctagcttttcgctacagtgttggctgctcctttgttcgtggaggggaagcaaagaacctcgggctgatggttctcagcacccgagggggacaaagttgccgtgagaggcgcagcctgctcgtgggctggtctgagctgttggttgtgttttgtttgaggatttggtcctcctcaggagagtcatttcaaaacatgccgaggatgcttgatgcactgagcttggagctggtgacatcaagtcaactggccgcgtaaacacctgggtggctcaagcacagcttcaggtactgttaagccgggcacaggggccccgctccgcccggacagctgccgccttgctgcgctgcgcaccccagagagcctccggcaccgcctccgctgcggcaaagcgggctgtttgtctgagggcctctggcgctcccttggcccagacgctgcacattgttcgggccagggactgggtcaaggagattacgcagacgctgggagcacacgggcagagtggaccaagagaggtcggggcatcatagggatttttcgaggtaacccttattgggctttggggagactcgttgcatgccacgccaggagcagggagatggcagcagtagcctcccgggtgaccgctcctctgtattatttgcttacagatcaacaaaaaactacagtgattgaaaacggggaaatcaggttcaatggaaaagggaaaaagattcggaagcctcggaccatttattccagcctgcagctccaggctttaaaccatcgctttcagcagacacagtatctggcccttccagagagagccgaactggcagcttccttaggactgacacaaacacaggtaattcccgagaagcccaagtatccctgaaatgctggtaccgcttgcagatcgggcagggagcacatcaggaggaattgttggcctagtcaaccaaggatggaaggagcttaatgacaaatgccttttgctccagttatgcactttcctgggacaacacagtttggaatgaatgacctggtattgaatactggattggatttgcacatcctcccaaccctcggcgaccccaccccagcctagaatccttttgtgaccaaactcataattcaattgagtgttattccagagcagaacaacatgaaagagaacaaacatttaggagaaaaaggtgtacaagccaggaggcagaataaggttcaacttttttaaggatccttttgtaggccctgggaactaataaggttttcaacccattgacacagaaagaaaacttgtgaaatgaactaagaaaaaacaaagtaggcataggttccaatgaggtttagtaaaggctccaaagtgcaatctatttatcctaggagtgtcaaggtgggtttttctgaagatttccctaagcacggtggttaagtcatctgggtgacagactgatgtggtctgagctgcctccctggagcacaggacttgggtgcagtggcagagttggagatcaaagagaaatgttaccaaaattgtaacaggtgaagccacagttaagtacagttactgaagttctcccatcctactaatttgaaagccatagaaggcatttcagatttcacaagaaggagcttaggtgagtatattaggaccctggtcaaaaagccaggctgcaatcacctgcagtttttgttgattaatttacctacatggagtaagtaggcctcatctgatgtaggtaatcttcagcaaggggacctcaggttttatgagactgttgctgcagactgattgtgtgttgacttaagacagttgttccttaagctctttttcaatttagcctgttttctctttccatattgctattcataatatttggggtttgatatgaagggattccggctattcagtgacttgtatgcgtcttgaaaaagtagattcttatggctagggaattttaaaggtaaaggaagctgcaccataaaatttccttcttcaaataaagtagatctgaaatgttggcctagatatgctcccatcccagattcccgattcacgtttaattttcagaagccctttgacttttaattactatactaacaatcatgtgatgatccttgaccacagtttgactaggcaacatacaaaatagggaatgaaggagctgcagtccttaatccctgcaaggttatggggatatatttatgtctggagaaagatgcttcatgtataatctatggcatatgcaatatatgcatagatatattcaaggcatttagttataaatgtacaggctttaattccttcagtcatttgctccttgtacctttatagagataacagcttttgggtatctctatgcatgtacacggagaaaatgactgtgtaaaatagttattttacatagactaaatttacattactaaattttatgtaaaatgacaagactttcagaggaggtgcattcaattgaatggctttgatttgaaagggctgcttttaaaaatcctttaggctttggacctggtcatctcattcagctttttcttatttatactgttgttttaaacctacgctagcacgcaattctagaattacaataactttaggtatccaggcaagatacctagtatgttgtaggaagtgggactgtaagaggctagaaagaggtggaaggaggcggggacttggcttgtaggcgttggcggtggttgttttttgttttttgtttttttgcttttttaatattgcttctaaatccctgagtgacgttagaggcactggtttgatgtttatgggcctaatgattgctgcatttcttgcaggtgaagatatggtttcagaacaaacgctctaagtttaagaaactgctgaagcagggcagtaatcctcatgagagcgaccccctccagggctcggcggccctgtcgccacgctcgccagcgctgcctccagtctgggacgtttctgcctcggccaagggtgtcagtatgccccccaacagctacatgcctggctattctcactggtactcctctccacaccaggacacgatgcagagaccacagatgatgtgagttgcccaagggaacaccctagggaaacgtctgaacaaggaaaagaggatccgggacctgcttgtatctgcgaaaaggagccaaaggagcaggcttaggagagctcataagtgtggcaagaagccgactaggctcattctctctccctctctctctctctccctctcctttctttttacttcttcctttcctccattccttctttctttccttttcctttctacctttcttttctttttgcctttcaccttttttctcatttaccttctctcttgagcaacgtcagtaattgatcttgcatctcagagagagagaaagagcatgtgtgagagagaaactggtttctatgccagcactcctgaaaccccttactgtaaggatattttctcttaccccttgggatccaggctctgagtctcttctctttgggagtatccatcaaaatgactttttttaaaaacagattttcccccaaccagaagaatctgcacaaacttggcagcgtttttacttgtttaatgagtttaagacattacatggtgaaagagaagcattttggactcctgcatttttatttaccattcccagactgacgagaaaaagaaaattcctcacataacagcccttctctaaagaaaaaggaaaaagtggctgtaagattagaacattgctacaaagggaatgctgcatgttttatcaaaatgcaatgaccaggaatgatggttgattaaaaaaaaacaaaacaaaaaccactctttccccaccccacccccccaaaccctgaactggaatcaggaaagacggaggaaacaatcaaaatcaccattctattgctttgacacctttactaggtgaattggtggcattcacaaagctaatagggacgtttatatcaagaaacatttctgtatatattgttgaattttagttgtacatatactttgtatgtttttgtcttctttcatatatggagtaaaagccacaaaacgctgagtgtcttgtatatttctctctctgtgtgtctctgtccctctctttcctccctcctccctcacttcccttccccccattaaattttctatcacccttaaaaaaattcctatttcctaatatgggaagtcatatgtatatatatgaacatcaagtgcctgcaaagatgtcagtttgcacactagcctttgtcttaggtagtttaacattaaccatggatgttctttcaactttctttacatattacgtttttattgtaatttctacacatttacctatgttttaaacattagaatgacctatcctcaagttaacttctagacatcacagtagtttctagtgctgaaactgagtattctcctttcccttttcccagccaaaataatacagccatatttgtctttgtttggatgcagttttttaaaatataggaaagaaaaaaatagagagtagagtgcacaattatgcctacttaatgtttaaaacccattgccagctagctaggtaggaaaatgcactatgctggatgaaatacatccttccgatcttggggaaagcacagaaataatgaaaatgaaaagtcctttcgtcatacaagcaggaagccccatactgcgagaattaatggctacagacctgggcatccttcaaattatgaaccttgaaaccactgagccatttatcagaagtcaatagagatactcagagtgctccatataatgacagcgacatacagtcgtgcaaaaggacagtcactataattagacacaaagcaaagactacttaccaatatacccgttcctttttttgttgagcaacttccacgctcagtcagtcttcagaatggtttaaaaccgatcagtcttgtcattttctagcattcgcattgttacattaggaaaaatgttttcttttcttttttcccccttcctactgtgaaactttgggttcgtagctccccaggatcaattctgaacaaagcctccagctgcagtgccatccaatttgaagcagacattggggacaatttaaggtttttatccacaagaaggtttttttccattctcttaaatgcagccataattagagtaatttttcatgtagcccgctgattacagcgtttttaccgtcaaagataattacctgtaattttcttccacttttaatactaaaaagccatctttatttagattcaggaacaggaaaggcgaaacaaaagagggaaattattctgttattcatacacaaattgcagagacgtaggacctaaaattgaaaattaaccaaaattataatgctgaaaagaatggaagaggctgcagaagtacagctggtagtggggctttgctgaattattcaaattacgttagggagaatgctaccatacatcgaaaccaacactaatttttcgttaaaaaaaattcaccagatgcatgccaaaccactgtgagtgcataacattctgaaacccggcaaatgcatgttgacatattcgaggtgttgtcatgatgcatttgtatctatctctttatctcttaacaggagtttaattaaacaagaaattctgccaagtagtcccccccaccccagactgcccttggaactgggctttctctggatcctctgaaccttaagggttaatatttttactctttagaatgtattgaccctatggtaagcggattcccgagggagggattggtaggaggggcgtgggcgaaaggcatcgcccagtggtggtgcctacgacgcctccccacgttcggacttctccagaggttgcagagttcgagctgtggagcctagttctgaccgtatttcctatttaaaaagagataaagtgggggagagagagaacaatagctgggggtggggtagaggagggaggggatgaagagaacgatttctctttggcaccaataaacatctcattatcttttgacacaacttagtcaaaaggtttctgccgccggagaaaggcctttttgcactggaatggaaaaccaaagatttctcaggcacttaacatctctagttgcttacaatgtctacacggtcaggaaacagagtcatctatagatagaacagcaccgcttcttgctggagacttccttggtgcgtccctaaatctgggttttctagctccctagcttggttctgcgtctcagccaatcatgcccctccaaccccaaggtcgcagcgtttgttctcggagggcagtaactccaagatccgcatagcctccccctcccccccgccccaacacaccagcttgaggcaaagaccctgaaaagcagccttgaaggggttcagaggccagttattccggaaaccttcccccaagtggaggaaagatgtcgaaggggcttcaccgtccagagattcatcagactacacctgcctttgcaaatgtccgcatacctgtggttctaaaggagccccgtcgcgagctccgtttgatatcttgtcgcctcaaaatctaaaatcatggccacgtgtaaagacctctctggatttacctaggattagctgtgaataataattttcaaatagattttagcttggaatctccagcagagtctctccacaccttatagaaacatggtacttttcgcaggctccagtcacaagctgcaccaaatacatcaacaacatagaaaacaagaaagacaaatcgaatacttaaggatcccattctcactcgaatcctttcactcaacagaacaacaaccctttttactgttagaggggataaaaggtcagcatagagaaatctataaagcaaagttgtagcccatgataaattacaacggcaacatgtatcttggaaagtgtgagaagagaaataagaactgttccttgaagtatgcaagaaataaaaacttaccctcagtgaatatctcttaagcaatgatcagggtttagaaatctatactgaaccaaagcacaggagaatatttttctgagtctcagggcagaagctctttctctatattcttggttgagtgagcacatccaggtgtgaaattgtttgcacaccccagcacctcttatattgccagcaaaattagctgttattactgtcactgtttagtgatggttagcgtggtacaaaaaaaaaaaaaaaaaaaaaaaaaactgctgtaatcaagacctggcgcatctttgcaaattacagataattgtaaacgtccagattatgataatagcatcctaatccagcctgcaatataattattacagagtgttacatctgaaactgtccagtagggctaattcagccattatttagaccctatttttgcactgcaaatgggttgctgagctgaaaatgtacgattgtaatttcacagggcactcaatgagtaatggtataggaagaggaaaatacaaaagtgaaatgtgaacagtagcgatcaaatcaaaccctgaaggacaaaagactgtttgattcatatggaaaaagaagagcgagaattaagaaaatagcaaatcagtggtctgaagcatttcatgtccaaatcttcaatagtgcagggctgatgtgtttgcaagggctgctgcatctgctgcttgtctggagtctaaaataatttttctttttctttcttttttccaaccccctgtctttttttcccccttctctctccagaaacattttcctgttttaaaaatgtgtccctcccccaaagcaaagaacatttgtcagtttcaccattgtttccacaaaatcgcctgagagtgtgcctgtcacttgtttatgaacattttcttaaatgaatttgctgtctctcttgttatccaagcaaaatgcccttgggcacttgtgtttctgccctctgtcttcattctctttcagcaggaactaagtcatagaatcctaaaggatattagcagaaaacgtattaattgctgctaattaaatatagccggctgggaagctgtcttctccagttggcttggctggctattggttttaatcctatcattaacttttattaattaacattcccccccccccatataaaccagtccagctgctgcttttgctacctgtcaccaatgtgctaaaatgagcaaggtcaatcttattaaaatataggaggaccaaagaaggagggagttagagcaagagagggagagttagagcaagagaggctggagacaggctgggggactatgctggtcccagagtcaaagagctctaggggttcaagctgtttcttccaggaggatgaaccctgccctggtggagggttctggagtctagttctggttcctggtggggacctcctagtcaaagatacctaaagcccatttatccccaggagctcaattttcccaccatgaatacagagaatttcctaggcatcttttctagcctctgggccaatgtgtgtcgactctccctcctcccaccacttcacagacccgggagctgcccaaccagggccaccctgcaggatggcaagcaggtttcctagctcttgtgaatttaagggcaataatgaaatgtcccctgtttagt

SEQ ID NO: 160 - DNA, 8896 bp, Homo sapiens
  source 1..8896: mol_type = genomic DNA
agttggacaattccctggaccagatggctctcagtttcctcctctgtaaaatggggccggtaataagcaactctctggattcaccccggtttgctgcgaggatgaactaatataatagtctttaagtctgtgacgctccagatgttcttgggaatgagtaacgcgggtccacaggccgccccctcgggtccggccagagcatcggcaggaaccgaggagcctcgggggacccagcgtaggtccttcccgaaaccaacaccttgggtgcggtggggcagaggacggggatgaggcggccggaaccgccctacgaggagaggctgggaggctccgaaaacctggggtagggggagcgcaccggggctttagagggcgcagcggccaagggcaagaaagtttacactcccagaagcttccgcacgctttctcccgcctgcctcttttctttctaactcttccctctcctgtctcctctcgccctcttttttctccttttttatccccttttcgtccatcgctcttgccggcatctttcttctctgggtccttctcccccactttcatctcatcgcgctcgcacttcatcaccagacagccaaaccccctttccaattaaagtggaattaggcaactcaatcaaattagttccccattaaagcccttctttattaaaccgttttcttgtcctgctattaagtttcactgcctggcggaactcgagccggccccagaagtttaccttgggatgtcgccggacccagccgaggggaggagtcattcttttcctggagcgggggagtcaccctgcggggagcgggagggactggaggttgaaggagagggtcggcccaggagcggctaatttgctcagctcggcgtgaggagggaaggtgaaaagggtgagagacgaggtctggctcgaagtcgcgtgctcacggcccctctcccaaattacactttttcaaggaaggcagcatgccacccccaactccccagaaccccataactcccaggctgtagcccttgtcagaagaatggtagcagccaccctgcccagccgtcgccttcgttgcctgtggttccaaatctgagatggggagcgcgcagtgtgtacatccaaatctacacctcggaaagagcagggactgggcccccagccttgcaagatccctgtgaagactggggccgacgatccaaaaactaagagccggggcaaggtgacccctccgcaagggtgcccaagctggggtacacactgtgttccctctgctcagcggtcgcgggtccttcgggagttgtgagccccgcgccactctggtgggataggtcttccgagtaccacaggaagtctcctctcccagtagccccgagggtcggagatcccacgggacctcggacaagcgtctccttagcgccgcggcctgagtgggaaatcacgaccttccccagcgccccacccccaccccctatttctcgaggagcgggacgggattcggcattgttttcttagaaaataacatttatttctagctcatatctatgcaaaggaaagcacaaagtgctgctctgcagcagcgttttccgctgcgggcccttcagtcagggcgtttggcgagtcccgggaggcgaggatgggcccgcgagcgggcggttctggctcagtcacacgtcgctctgttcctgcttcagtgcgcaccttgacggctccttagggacagaccagccgcaggcaagaggggcaggtgggcaggattcatcccgagtttccaatatatttaatctctaaacctgataagtacaatgcgcgcatagtctaatttttttccattttgtccctttttttgcttgttttgaatgtttttcacgttaataccgaggtcacctacagattacaattaataacttagaattccattttataacattatacactggcttgtatatatatatgtatagattatatatagatttatacatatataaaaacacactgcaccaaggaaacccatgcttatcggcataagcaacaaagagagcgacaaataccgcaacgaggaaagtgcaccttaaaacttgtttcctttttttttttttacaattgtatcgatatatatgtgtgtcccaaagactcagtgccaagagatttatacatcctaaatttatatttgttagagcgaatatttaaattttttaaaagtgagggctggggagacacagaaaagactctcggattatcctgccatccactgagagccggatgagcacagctaaggagccgcaggagcctgcgctgctgtcgcagcctctgaattctcatgaattcccagccttttggaaagggggccgggtgaggctggaagagggatccggaggtaggagatgaggacccaggccgcgcaccccctccgagaacacctgcacctgtctgtagctgctccccctttgctcagccttccccacccaccctcctaaacaaaacccaaaaaccaccttagagtgagaagacgcccagccagggcgcagagagagcgctgggcgaagaggggtcgatggcccgcgggaacagggctggggttcctgtttggggaccggccggctgccaggcccctcgccctactgcttctccggagcgccgttgaccataggcccgtacaggccgccgccgtaggtcggctccttgtgcaccgccgcagcagcggcggccgagcggtcacgcatgagatcgctaaaggcgtagtccatgggtgggcggaagccgagcgtgggcaccaagccggcagtggagtagggcgccatgaaggccagaccgcggctgtgcgccgccgccgcggagtaggccaggcgcagggggctgaggccgagcggcgcgcccagcgggtaggcgcccgcgtcggcaccgaagtgactggcgttgggctgcagcggcgagaaggccgagcggctgctcagcgagcccagcgccccaggcgccatggcgccggccagcaagggtctgtggtgcggaggtgcggcgggccccgcctgcagcggcgcaggcagcccaggccccccggcggcggcggcggcggcggcggcggcgtcgacgcggctgggccacgcgtcgtctgcagctgctgcagcacccacggcggccttatctgggggcgccgcagggcccaggccggccgccaggcccccacggtggtggttcagcacctgctcgatggcctgcaccacgtcgccgccgcagccctgcaacaccagctccaggacgcctcgccggtggcctgggaacacgcgtgtcaagatatccagcggcgtccgctgccgtggacccgagcctccgcccagccctggcgccggcgcggcctcaccctcttctttgtcagcctctgaaccggattcagagcccagagggctagcggagcccgggctgtcctcctcgccgccgccgccagggccagcgctgcctgggcagctgccacctgcctctttggaggcccgagctaggggcgaaccagaaaaggactcgccatcgccgttctccgagcctgagccgggccgcacctctggggacgacgtcccgggccccgagtctgcgccgtcgggtgataagggcttcaccggcggcggcagcgggctgcccgggcggcctgcctgcagcagcgtcttaggaaacaggtcaaacttctgcaacttggcctctgggaggggagaaaacgtgtcgtgaggagcggttagctagaagacagcagtcacagcacctcggccctttggatctcagtttcctctccctcagccccacagcccttattcactaggctccagtgcccctctttctttttgctctagcattccttccgctctgagcccctacagccctgaccccagggctccctctctttctgtactcctcagaaccccaactacctgtgccctgtaaactcgatgttcagtgctgctttccccacgtctgtgccccaacacctccacccttaactgcccttccagtcctgccctgccgtggagaagtggccaggtccagggttcaaacaagagacaacataacttctgcctaaccacgctgtacagaagagcccactgtatagaaaatgcctgccctggcagtgcagcctgtaaggaaaggcgccttggttatctaggaggtcccaagcttctctacaggcagaagtacagcccctgtttctaatccaccctttccaaaattgagacctgagaagttcttccctcccaagtttagagcggatccctcctttccctcaacggctctggcctaatttcttccctccccacaaaaagccacgggggtccagaaaaagagggtggtgctaggcaggcagtaggaagcgaagaggaaaagacataggaaagcagacctgagaaaccagggagggtgcggaagaaactagaaggagggagggcgcagcaagcggttgtccagagggcgttaggaacgcgagaaggggaaaagaaactagggcgtctcagaacctagggcgtctcaaaacctagggtgtcagttaaagggggggggattccttaagggagttgggaaggagcagagggaaagggcctgtggagaagcgcagagcgaacgaagatgcgcaggtttccacctggggagaagacgaagcaaagaagcagggacctgcctgcgtttgggtagaggcgagtaaaaaaattaaagcgtgtacatttcggcccgatgcaggagaaaggggtaaagtgcaaatgctccagaagcgggagaaaggagagtttctgtacccacgctccatacccgaggctgggcgagcggtgaaccctagcagtcgcggcgactggacacgggggttctactctttctgaaccgagacaagcccctgggccccgtgccccagagctacgatcctgctgcccctacctgcggcctggccgcgctctcacctgagccccctgcgccagctgctccgcctccggtccccgcgggcgctcccgctccaggtcccccgccgtcggcggcgcacactgaaccgaagacctcgtaggcgggcctcggggggatgatgccgttggcggcggccagcgccagcccctcggcagtgccgtagagcagctgcagctcgcgcgcctcgttctcctcctgcgcctgctgcctgcgcagcgccacctgcgccgccatgacacgctggcgctccgcgatgagcgtgcacttggcgcacaggcagtccttccagcgacagtagcgtttgtggcccttgagggccgacaccacgccatggttgcgacagcgcgcgcacttgggggtccgcgggtacttctcggctgcccgcagcaacagtggcggcccccgcagcaagccgcctgccacgctcaccggtagcgatgcagcggccgccgcggctgccgccaccgacgccaccgacgccacaggcggccccgtcgctgttgccgccgccgccgtcgccgcgccgggcacgctgggcagctccgagcgcagctccatgacaggacctgacgggaaagaaggtgggagaggggagagacctggtgaggagcacaccgcgcgctaggccaaagcgccgccttgaggaacccaagctggagagggaaatttgggccgcggaggctgggctagaggggccagaattgctgggaggaggtgcagtcggaacctccttgtgagccctagcaccttcaccccagtctggccatggctgctcttagacctgatatacacgctaggggtaagattttgtctgaattagtgattccgctggaaaaaataaagagacatgtaaagtgtgaaagtcactgattcagatggctgtaatgagaatttggaaaagttaagatgataccccaaagcttagcctaattggggtgagacgggtgagagaaatgctcgtttgacgggactgggattagagcgacagttttggcccagaagttaggctgatgccaagggcaaaacaggaaaacccggagcaaaacggtcagtttggtggaagggtgaagaggagagagatgtgaaggcgcagatgtgaaggccggttgggccggagttttgtttctttttgtttgtttatttttaatgcagtttggggcagaagctttggagagaaaaatcaacaacagaaagaatagctttaggaagcagagtgaggacgaggaaacaacttgggcaaagttaggcccagtggctctgggacccgtaaaaatgtgagcgccaaaagttccacggtgagggcctccagagagtgagagacaaaatgtatgtggaatttagcttaggactgggaagtattaaagagaaaaattcggccaaagaaactttctgtataggcaaacccagcccaaagatgagcttcatgggcaaggaaaacagtgaaaagcagctgatctgggtgtccgggatccaggggccgcgcctgggagaggggaatgtgtaagaaaaaaccccacaggcaaatgctgggggaggggattgggtaaaacctgtggtgcagttttttagcttcgcagtctggagtagtagtcggggcggaagacgtatcctgcgaaaagttaggcatttcgggagggggatctttctcgaagaccacctcacactgccctcccctcccctccgggtttagggacagagtcgtcagacacgccctccccgtcttggggtcccaggggacccctctcgagcgcaggctcctgcgttctgatctcagagttggggtcctaggacacggatggcccagcaggccgcaccaagccaggggagtcgccttcgcaactggccataaacggacaccagagtccctcccacgccgcagccccataaggcccaagcaggcccagctccccgcttctgccgcggtctcctctgcttcccgcgttccccgtccctgccagagcccgcgacagagtccttgtgtctccgtccgagagtcccagacctcctctctatgagcgttgcctcctctcccagacccttcgggcgtccctaaggcccacggggcccaggcctcctcaacaggggccgcagaccaggtctccacccactgctctccctgcggccctcaactacctgccttgggctccgggatcctcctcctccgctggcgctgcacgcgcctcccggctccactggcgacgctggagctcttggccgcttccctttgcccccggccccttatctgaccacgtcaccctccttcagtcaccatgtccgaacttccggacccctcagaacgcagcgcagtccaaccctcccttcagaaatccgggtcggaggctcgtctgcgggccgcgtggttggaacccgcgacctgactctcgccgtgccgggtcccctcgcggtgcgcgccggacgctgcgcgcagccggggcccagttgcccggcgctgccagactctcaatgagccgctcgcccgctctattgttggtccttagggctccattagacagaattggacaacaatgtggcgcctgccattggccaggggaggcagacggcgctctgattggccgggcccgcgcccggggagccccgcattctgcagtgtccgaaagattcgaaactccaaaagctccactgcgtgcctctgggaggggagggggcgcgccaggaaaggagtggaaaaaagtgggcgaggaggagcgttgaaaatttcctgacaagtagtttccgtgcgcccgagagcgtgtgaattgctcctaattaccgtgtccggtgcgcctctctgcgtagacttgtgtaacctctcggcttctggggcgccggctcggctgcaccgctcttactggcctggggcgcttggcaaagccgagcttcccaagtggctctggagccctgaggcgggatggggggcaggtgacaattcaattactgcggtcggggtaggggcgggacaagggtgcgggggtggggaagggagggtgttcaaggcataaatgccaggacgatttttcctgccttcttcctgctatgtttcggcgcgctcccaaatccgacgagtttggggtagttgggggctgctttggttttttcctcctgtctccttaaagctcagttactttattttaaaagtcctgatacgatagtcatcctggagggtaagtgtggtttatgaagattttcgtgtttaaagagaagctcagcgaagagaaatgagattgcacttcctgtcggtgcccgccacgtccctcgcgccctgagcctttcctctccccgcccctcttttcgcgtccctcagccccttttgagctctcttttcctcacttttcagcatctcgatttcttttccgtggtggtgggattctttttgtcgttattgcaaatgaacaaatagcccccccccctttttttttcttttctaaacgaaagtaaaaagtggcctctgtgtctccgcagattctcttaaactcaggacgcgcatcggtctgtccgaccttcccggcaagagacaaagtcactgctgggaggccccctcggacagttttcagttttaactttcgccttattctcgtcttgtcttgatgtcacggccctgaggaacagctcgttctgcagaagaggtaacaggtttcagattttgtttcctttttgaaaggctgttgcctttcaaacatctggaattaatgccgcggccctcgggcgagtcgccctcggtttctgtagctctgattttatctctgtgtcttttcccctctaatttctaaagttctgtttttccctctaattctgtttttccctctaatttctaatgttctgtcactctcgtttttgttctctacttttctctctctccttcagaataaagaaaattcgtttaaataatgaggaaaatgagcgttcctgtcgttctccctccactcttgaccgtgcgtctctgcgttgctctttcgaacctccaggccggcg

SEQ ID NO: 161 - DNA, 62778 bp, Homo sapiens
  source 1..62778: mol_type = genomic DNA
agattccatctcaaaaaaaaaaaaaaaagacgtaccgacaaacaccaccattttgcaacacgaagatcaacaacaaaaaagaaggtcaaacttgaagttctgtcctaaaattacacacattctgcctttagaaaactcagtgcatggtcacagatgagaagtgcctggctaaccagacttggggactcctggtttgcagtgagtgctgtcaaactcgcgttctaggctgggctcacagcaactccgactccaagctgtttaggcgcctctgtctccactcaagtccacagtcaaggtcactactgtgaaacactgtcttgcttttaatttccaagctgccttgttatttcttgggagtaggccaagctaactttaggaggaacttagtttatagtttaactttgaaacaaagatgataacagccctttcctgaagccaacctccttcttgcctggggaccagaatgcttttgtaagactaacacatgagccacaagattagaaattgtggtttgagtcatgcagctagaggccacaagattccaaacctccccagttgctccttaggataacaccactatcatcaactctaagattggtgctcaagatatttttcaggctctgcattctgatgcaccaggtgccaccacccacaccactaatctggctcaaccagttctgtgatcccacccaggaacagaagacagcaagagaatcaactttgactctccatggtttcatctccaacccgaccaataagcactgccctctccctggccccctacctgcctaattatccttagatgacccatctcaggattttcagaacctggtttgagcaataaagctccagtgtcctttagccagtttctgcatgcagccagtttctgcatgcagccagtttctgcatgcattaaactctctattgcaattcccctgtcttgataaattggctctacctgggcagcgagtaaggcgaacctattgggcggctacgcctgagatctaatgacaggctgcacgtgaagcccagaccaggcacctgtcttacaccacagggggatccagtccacagaaccagcgtccttccctcctggaacggaccttcccaaagccagaggggctctaggcggctcaaacaggggcttcccggctaccctggtcccaggcgggaccactcaggttccttctccaagccccctaggctgcagggcaggcttccctaggggcaggcccaggcctatagcccgggacccgcatcccgggcgagctgcaccctcccgagaccttccccatctgtacaatggggacaggacaaggcccagcaggcaggctggcgggggttccggcgacagagggggacagcgggcgagcacgacaagagcacaggcccacgtgcgcaccggcggggaggaagtagcccggcgccccgcccgcagcgcggaccggaagtgctgccgtaatctgcgctgagagtcgcgaaagcgctgttccccttagtgaccggcgacgcgggcaagatggcggcgctgggggtggcggaggccgtggcggccccacacccggctgagggggccgagacggctgaggcggtggagctgagccgcgccctgagccgcctgctgccggggctggaggccgacagcaagccgggccggcggcgcgccttggaggccctgcggcgcgcgctggaggagccaggccctgccgccgaccccaccgctttccagggcccctgggcgcgcctactgctgccgcgcttgctgcgctgcctgagcgaccccgccgagggctgccgcgcgctggcagtgcacctgctggatctgggcctgcgccgcgccgcgcggccccgcgatgccctgccgcgcctgctgcccgcgctcgccgcgcgcttggccggccccgtgcccgcgcgccgcccgcccgaggcctgtgaggagctgcgcctggcgcttgtgcagctgctgggcctggccgtggacctgtgcggcgccgcgctcgcgccccacctggacgacgctctgcgcgcgctgcgctgctccctgctcgaccccttcgccgccgtgcgccgcgagagctgcagctgcgccgccgccctggcgcaggccacgcccggtgagcaccccgggccccgctcccacacgccaccccacactctcacccccacctccacctccgcggcccctctcacaacccccgcggctcggccccgcccccctccacgcccgcaccccccaacatcccggaccccccatgcgccgcttcccccacccgcctgccccaaagcaccccgcccggccccctcctcccaccaccactgcttcccctgcctcacgtcccgccaccaacgcgcccttcagctgctcccttgtcctctacccccatgtacctgtttcctgcgctgccacgtgctccttgccccgtgacccctgttcctgcttggccctcactcacctcactcccctgtccccttgctccccgcctccaccctccacgccccaagccccgccccccacctgcctgctccctgtgccccctccacctgcctatcctgtgccatcctcctccttgcacgccgccctcccgcgaccctcacctcccaccctcctccctgcctgagccccctccaccccacccgggcccacgagccagcgcttctgtccagatacctggaaaccaccgcagaaattcctgttaggcggtttggggtggggtgtgccctgatagctgccccctttccttccctcgggggcttgcaggacttgcacctggttgagggcacgcgctttgagactctgctctggtcatttcactttctgtcccattcatcctactcccctgcctttccgctctggcttggaccactgtcctaagtggaaggaggccgcttctcccctccactttataacgttccccatcttttttagagctctgatctgatccggtcgttccctttccttagctggccattcctgcagggtcttgccctttccctcccctggctgggatgtggaatgatagcaggcgcctgcttcctgctggcgggaaggctttccgaaggagggaacactgatgctataaatccgtgggcggtagggagcaggaaagcagtgagggatctggccagctcaggccgtcccagtgatgtcccagtgatggtctgaatgtagtgggaagtgcagggggtgtcaatagaagtgatagacccgagttcaggttgttaaaagatcactgcagctgcgtggagaatagattccagaagtagaggaagagctggacttggggaaatgccgagatttccacgttggttaactttggatttcacatggtccagaactcctgtggagcttggggaagaaccttgggctggatggacatggccattgagaattcctggcatttaatgtatttcttcttcatcctcaaccacttccctacccagtctgtacatcagccccacgagctccctccctggaccgtaggttccacaggacagcactgtgcccatctgtgccccagccccaagcgcagcctgctggggtatgtgctcactggttgctgtggggtgagggactgtgcctctgcctggagcatcccctcatctccagcacctctggccttcctctcccctgggtggggggcctcacctctggtctcggtcacactgggcaacggcagagaggttgaggcgctcacccaaagtctcactggaatagccgtttcccagacgggccccaagtagtgcagagctgaggcaagaggcggcctggatgccagagaccctttggttctgactttttttttttttttttttgagacagggtttcactctgtctcccaggctggagtgcagtggggcgatctcagctcactgcaacctccgcctcctgagttcaagcgattctcctgcctcagcctcccaagtagctgggattacaggcgcctgccacctcttgttctgactttctgcggggactttacaaataggaagtgcagtggctttgcctggagtggtgctggcccagcttcctggaggagcctggggtctcgtctcaggtggggctgggagtgtggcctcgcctctgtcttctgggctcggcttctttcctctggccagtgtccccgtcaggcctccaccttggcttcagcaggtccaggctctctggtcttcagccacaatgggtttgcacccccagcctttccccgctggtcctcctaagcctctgggttgcacaggtgtcatcagggtgggacgcttgtccctgagcctcttcctgtgccgggcggtacagagctctccttggcagcctggattgtgtactgttcatgcagcaaggacctggcgtaggagaggaagggaggtgaggaactcataggcaggcagccgtcctctggaagcccacagagctgggcgaggcgtgtgggagcagctctggtaactgggggcctccctgtccctcagaccacttccacatgcagtcggagtctctgatcgggcccctgatgcagaccatctcccaccagcactggaaggtccgtgtggccgccattgaagccacaggcgcagtgatccattttggcaacgggaagtccgtggacgacgtgctttcccattttgctcagcgactgtttgatgacgtcccgcaggtaactggtgtttctcctggacagtctgttcctctctccaacacaggcgggctgacgtgctgtttttaactaactcacttgttcttttttcagagtgctgtatgcaccaaatgtcctttcattattcctagtcacaggacgttcctgttcacatcttggaaaaactagaagagagctgaactgttttaatgtttgatgttatgaattccaaggatgttagaaaggatgacttgtgtagttattgtctcttaggcacagtgtgcacttcagcagttgcagaaggttccttagtgctcccatccatcaagacgcactttcccgaaaagccaccatggttggtggacctggactgggagaagagtggagtcggggttggtttgttggggataattatgtcgttgggctttggaacccaccaagagacgggcaggcaggcaggcaggagtcctacagatggggctgagtgttggctttactgctggcagaatctggcctggagggcatgtcttggatctgaggccccagtgacttgctaaaatgctacacactgtggccaccggggaagctgagtgacctctgatctttctgtctctgagttacctgtcatcgtagtcagacatgtgatcttttgtgtctggcctcttcactgtgcatggttccaggtttcagccttgaagaggtaggtttcctgatgagaaatggcttgaaggtggtgagttgaagagtcactcggggtattctggggccaggatggaagccctgactcgctccctcgtctgtgctgctggggtccacccgtagggccggctccaggtgtgacatagcacctgctcaggacacccctgctttgcctccatggccaggcttcattctccggctctctccctccagcagcagagtggctgcctaggggctgtgcgcagagacacagggggaccctttcccaccaggagcctttgttcaccccccttggtctcatcaggccagcggaagttgagtcaccatgtacgctggccggcccctcctggagctggcgtgggttcggcaccaggcagcacagagggcccctgaggacatcaggctctgcccagtggggagaaagtgggcagagtgcggggtcagtgtccatgctgcccggcacttgcagcaggcacttctggcactggctaaatatttgggctgcggagggcagttcaaggggccagggcaagaacagagcccagcaagaagtgcaggcggccggctggtttttctctcccaccttccttaagcctgaggcagagcatggcccacaaggaaagtggagtctgtgtcatgggccaagtcttactcctcaaaacagtgtgatgactctgtatggagagctctgtgtgaatactgaagctccatagctgatagctgtcggtgtaagcctactgtcactgtctaaaaataaccatcactgtctaaaaataccgtcactgtctaaaaataccatcactgtatcgatagctgtctgtaaatactggaactctgtggagcacgctctgtaaatactggaactctattgctagctgtaaacggtgtaactcagtataactataccgtaactctaaaaataccataactatgtgtcgacagctgcctataaatgctataactgtattggtagctatgtataagcagcctactctgtatcaatagctgtctgttagaaagctgacatcacattgttgatctaaagcaagcttgtccaacctgcggcccgtgggccacatgcagcccgggacggctttgaatgctgcccaacaccaattcataaactttcttaaaatgttacgagattgtttttgtgatttttttttttcttttagctcgtcagctatcattagtgttagtgttattttatgtgtggcccaagacaattcttccagcatggcccgtttcttcccaatggggtttgcgtcctattagagaccctgcacggcccttcacgtgagtttcgtgtggagtcacggtgctgccccttttactctgatcagccctgcgaccccgtcctggagctccatgtgggctccttgcagacacctccaccccctcaacaacccagggactggtgccctgggaccccatcctctctgcacagaaggtcctgactgccttctgactcgtaggaaaccttccagcagcctgctagactcggcttaaatcactgaacttcactggaagggcctggaaataacttcatctcctccttacaaggctcagaggcctcagagctcactcaggtagcacagccaggtgagcctcagagcaaggtcaggacacaggcggtctagccgccctggagccttaggccccgggatggtgtctgaagttgtggaaagggggtgtcccagtgcggcaggggctaatgcatctccccacgctcacatgactgcagctccgagcccaggacactgaccacacccagaaccccggcgaggcaggcaggacggacgtatggccgtgcagttgtgaagcaggccttgaacaaactgccctgtgccgccctcaggtgggtgactcatggacttcgccctgcaggggtgccctggttgtcgccaggcctgcagtcggcagctgctcagctttgctgcagttttcctgctcgatgtgtgctgctggtgaggccaccaggcctgttcttgtcaagagagaccttccgggagcaacagatgttacaggagagactggggatgcatggacagcttttcagagatgagtgtttgtcacgttcctgccaagtacctgtttgccatttgtatgccttcttttgagaaatgtctattcagatctgtccatttttaaatcgcgttattagatttttttctattgagtttgagctccttatggattctggttgtcagtcccttgtcagatgggtatttgtgcagctgtttgctcccatcctgtgggttgtctcctcactattgattgttttatttgctgtgcagaagctttttaacttgatgtgatcccatttgcccaggccatgtcccagagagtttccccaatgttttcttttagtggtttcatagtttgaggtcttagattgaggtctttaatctattttgatttgatttttgtacatggtgagagataggggtccagtttcatttttctgcatatggagttccagttttcccagcaccatttattgaagaaactgtcctctccccaagatatgtccttggcacctttgtcaaaataagttcactgtaaatgtatggatttaatttctggcttctctattctgttccattggtctgtgtgtctgtttttatgccagtgccaagctgttctggtcgctgtagctctgtagtataaattgaagtcaggtaatgtgatccctccagttttttgtttgtttttgtcttgttttgttttttgctcaggatggctttggctattcaacgtctttcgaggttccatataaatttaggattattttttctatttctgtgaagaatgtcattggtattttgatagggattgcgttgagtctgtaaattgctttgggtagtatggacattttgggtagtatggacaatattgattcttccagtccatggagtatgttaccattttttgtgtgtgtcctcttcagttttctcatgtcagtggtttatagttttctttcttttttttgagacagtctcgctctgtcatccagggtggagtgcagtggtgcgatctctgcttactgcaagctccgcctcccaggttcacgccattctccttcctcagcctcccgagtagctgggactacaggtgcctgccaccgcacctggctaattttttgtgtttttagtagagacagtttcaccatgttagccaggatggtctcaatctcctgacttcgtgatccgactgcctcagcctcccaaagtgctgggattacaggtgtgagccactgcgcctggccttatagttttcattgtagagatctttcacttctttggttaagttaattcctaggtatcttattttgtttgtagctattgtaaatggaattactttcttgatttctttttcagatttgttaactgttggcatgtagaaatgctactggggcttttttggtgattttgtatcctgcaactttactgaatttgtttatctgttctaataggttttttgtggaatctttaggtttttccaaatgtaagattatatcatctgcaaacaagaataattatcttccttttcaatttggattccctttatttttcttgtctaattgttctagctagagcttccagtactgtgttaactaacagtggtgaaagcgagcatccttgtcttgctccagatttagaagaaaggctttcaatttttccccattcagtgtggtactagctgtgagtcttgtatatggcttttattgtactgaggtgtgttccttctatacccagttttttgaagatttttatcatgtagggatgttgaattttatcaatacttttcagcatcacttgaaataatcacgtagttcttgtccttcattctgccgatatgatgtgtcacattgatggatttgtgtatgttgagccatccttgcattcctggaataaatctcacttggtcatgacaaatgatctttctcatgtgctgttgaaacagtggaaactttgcgtcagtgttcatcagggatattgtcctgtagttttccttttcgattgcatctggctggttctggtatcagggtagtactggcctcataaattaagtttggaggtattccttcctcttctagttcttggaatagtttgagtaggagtgacattagttctttaaacgtttgataacatttggcagtgaaatattgcgacccgggcttttctttgctcagtggcttttcattgcggcttcaatatcattacttgttactggtctgttcaaggtttggatttatgatttaatctgtgtaggtcatatgtgtctaggaatttatccatttcttctaggttttccaatttattggcatatagttgctcacagtatagttgctcacagtgtagctgctcacggtgttgctcacagtgtcgttgctcatattgtagttgctcatattgttgctcatagtgttgttcttcatggtatagctgctcacagtgtcgctgctcacgatgtcattgctcacggtgtagttcatggtgtagctgctcacggtgtagctgctcacagtgtcgttgctcatattgtagttgctcatactgttgctcatggtgttcttcatggtgtagctgctcacagtgtcgccactcacgatgtcattgctcacggtgtagttcatggtgtagctgctcatggtgtagctgctcacggtgtagctgctcacggtgtcattgcttatattgtagttgctcataccgttgctcgtggtgttgttcttcatggtgtagctgctcacagtgtcgccgctcacgatgtcattgctcacggtgtagttcatggtgtagctgctcacggtgtagctgctcatggtgtcgttgctcatattgtagttgctcatattgctcatggtgttgttcttcatggtgtagctgcttacaacgtcgctgctcacggtgtagttgttcatggtgtagctgctcccggtgtagctgctcatggtgtcgttgctcatattgtagttgctgatattgttgctcacggttttcttcatggtgtagctgctcacagtgtcgctgctcacgatgtcattgctcacagtgtagttgctcacagtctctaatgatgctttgaatttctgtagtatcagttgtttgtaatgtcctcttcgatctctgattttatttacttgggtcttctctttttcttagtctggttaaaggtgtgttgattttgcttgtccaaaaatctaactgttcattttgttggtcttttgtattttttttaatttcaatttcatttatttctgctcttatttcttgtcttctactaattttgggtttggtttgctcttgctttcctagttctttacgatgcagtgttaggttgctgtttgaagttatctgctctttgaatgtaggtgctaattgctatacacttgcctcttagtgctgcttttgctgtttttgcatattgtgtttccattttcatttaagaatttttaaaatttccttcttaatttcttcattgacccaccggtcattcaggagcatattatttaatttccatgtatttgtgtagtttccaaagttcttgttattaatttctagtttcatgttttaaggcttgtttcgtggcctaacatatggtctgtccttgaaaatgatctgtgtgctgaggagaagaatgtgtattctgtagctgttggatgcaatgttctataaatacctatgaggtccattagatctatagtacagattaagtctgatgtttctttgttgattttctctctggatgatttgtccagtactggaagtggggcattgaagcctctagctgttactgtgttggagtctgtctctctctttagctctagtaatatttggtttatatatctggatactccagtgttgggtgcatatatatttaaagttgttatatcctcttgctgagttgacccctttatcattatatgatgacctttgtctcttagtatagttttcgtcttgaaatctgttttgtcttaagtgtagctattcctgctctttcttgctttccatttgtatggaatatcttttttcgcatccctttattttcagcctacgtgtgcctttttagtgacgtgtatttcttgtaggcaacagattgctgggtcctgtttttctttacccattcagccgctctgtcttttgaatggagagtttagtctggttacgttcaatgttgttattgataagtaaggacttactcctgccgttttgttgttttctggttgtttcgtggtctgctcttccttccttcttgccttcttgttttcctttttatgaagatgattttctctggcggtatgttttaatttcttttttgtgtgtgtgtgtatctgttgtggcgttttttatttgaagttaccatgaggcttgcaaataacataacccattattttaaactgatagctgaacactgattccaaaaacaagcaagccaagaaaaaaatgaataaaaactctacaccttaattttatgccctcagctttttaactttttgttgtttttacttatatctttgtcttgaaaagtcattgtagttatttttatttttatttatttatttatttttattgttttatttttgagatggagtctcactctgtcacccaggctggagtgcaatggcgccatctcagctcactgcaacctccgcctcccaggttcaagcgattctcctgcctcagcctcccgagtagctgggactacaggcacccaccaccacacccagctaatttttgtatttttagtagagacaaggtttcatcatgttggccaggcttgtcttgaactcctgagctcaggtgatctgcccacctcagcctcccaaagtgctgggattacaggtgtgagccactgcacccaaccagttagttatttttcataggctcatcttttagtctttctagtcaagatgtgagtagtttacacatcacagttacagtgttacaacattgtgttgttctgtgtgcttactgttaccactgagttttatccttttagatgatttcttattgctcctcagcatccttatttttcagattgaagaaccctctttaacatttcctgtaggacaggtctgatgttgatgaaattcctcagcttttgtttgtctgggaaagtctgtctccttcatgtttgaaggatttttcactggatacactagggtaaaagtttactttccttcagcactttaaatatgccaagccactgtctcctgcccagtgaggtctcctctgagaagtcgttgccaggcgtactggagctgcgttgtacgtgatttgttgttttttctcttgctgcttttagaaccctttcttcatctttgatctttgggagtttgattgttaaatgtcttgaggtagttttattgggttaaatctggttggtgttctgtagccttcttgtacttcagtgctggtatctttttctaggtttggaaaattctttgatattatccctttgagtaaactttctaccccgatttctctctacctgctcttgaaggccaggaactcttagatttgcccctttgaggctattttccagatgctgtacatgtgcttcattctttctattcttttttcttttgtcttctctgtgtattttcaaatagcccgtcttcaagctgctcactaattctttcttccacatagtcagttctgctgttgagaggctccaatgcattcttcagtatgctaattccttttttctacgccagaatttctgcttgatgctttttaattatttcaatatctgttaatttctctgataggattctgaattctttctccatgttatcttggattttgctgggcttcctcaaatagctattttgagttttctgtctgaaaggtcacctatccctgtcaccccaggattggtcaccggtgccttatttagttcacttggtgaggtcatgttttcctggatgctcctgatgcttgtggctgttggtcgatcttgctaggtatttactgtcatctttgcagtctgggcttgtttgtacccatctgtcttgggaaggcttctaatccatttattttgctttttagaaaaaaaaattgaaaaacgtcctgcttttttaaactcttatatggcagttcggtgttcagtgctgtttttgaactaaaagaaaagggataattcgtctcatgctaattggaatttgcaggtttcttatgatactaagtagagactgatagaaaaggtggcagtccgtgagactcaggagcagccccaaatcccggccctagctgtccttgctatcaggtgagatgtttgaagctcctttctgcaaaagaagcctatctgtgggttccgacagacaggtggccgtcctgggtggggccccgcagagaccctggcacacagtgcaggaggtcagggaggagaaagcagcgaggccaaacccagcgagttcagactgctccctggctgccggcctggggcagagtgtgctcaggccttgtggccctggacgcctgcccatctcccggagagggccccatcactgtacacctgtttgggctgggggctggctgcagtctggcttgtctcagccacgccctctgccccatcactgtatacctgtttgggctgggggctggctgcagtctggcttgtctcagccacgccctctgccccatcactgtatacctgtttgggctgggggctggctgcagtctggcttgtctcagccacgccctctgcctgacaggctttgcagcatctcagcacatggcactgggtgagcttggagtttgccgctcacctggattagcgtcgtggcaggtgcggccgtggcaggtgtcgactgcattaaaccctgggctgtctctgctcgagacctgccggcgccatgggtgaagacgacagtgacagtttgttctgtggggactctctagccaggtggtggaatggccgtggagctgatttgggtttctcttagttgttatctgggcatttgtatttgtggttgctagtaaggccctgtgtcagttaatgaccccggcaaacgcgccacacattcctgtgtcccctcgcgtgcttccctgctgctcgcacgccgagagtcgcctgtgcgcaccgcacgggcagcgggagtcaggcgcaacgggcctctccttgtgtgaacttgccctcccctcacgggaccttagtgacgagccctgtcagtcattctttcccatcttccaggtggcaatgaacttcggagcagtcaggccagggcccgggtcccaggccggcaggggcggatcctaggtgcgtctgcttggctctgggccttgttggagccggggcggagcagcccctcctccgagtcccagcgagtgaccacgccatgggcacagctgctgctcgggtcccctgcacctacgactggctgtgagcgctattgctaatggtgcatggctgggcagagacgcttcatccaaagtgtcaggagggatgaggctcctgctccccacggcccagccagggactgatggcaccacggagtcggcccctggcctcacaggggacagctctgtagctcgttcacaccccagagctcccaggatcagtctgcggctggcttcagccccaccgcttcctcacctggcttcttcctggccgttcccgcttcccttaaggagtgttggtgctggtccccgtctcaggcattgccctttgggagcttggctagagcacctggtgtgtgtgaagctggtttcttccgcctgcataggcaaggtaggcagaggccctcgtgccccctcttcagacacccagcagcagaactggggaccctactggtttcctccagagtccctgggctctgggaccagacgcctttgaggtatggccacggtgcaccacacttgctgtagccacggctcaccaagcacccagggtgagacaggcccagcccggccaggaggttttcatgcagaagactttgaacacgctgcacggctcaggtagcagctgggagcctgctctcgccaacaggaccaggccggggcacggggtatgtgtgtgtgagcctgcaggacagcagcattcctctccggcccagccaggagggactggcggagctggccgggacccaggcttggtggcgcccaggaccccggccacgcgcctctgtcttggggatggcatctaggcggtggtaggtggcccaggacctggccgtgcctctgcctcaggcagcgtccgtatggcagcactcagagccgcaccgtggcgtcagccccggcatcccctttgcctacacgaatccttatcccttcctctcatgcgcaggtccggcgggcggtggcctccgtggtgggcggctggctgctgtgtctgcgtgaccgttactccttcttccacaagctcatccctctgctgctcagtagcctcaacgacgaggtgcctgaggtcaggtacgtgggcaggcggccgcgggccttgtcttcctaaacggtcatgtgtagcagtggtggtttctctttgctcccagtctctcacagaaacctgctggtgtccctttgtccctgtgctccgaagggatgtgccgtacagaagtcgtctcgttttgtaaatggcatttcccatctttttaacattggactgagtatatcgacagagatcagacggccccctttgtgtactgtcagtagagtgctcacaagatgaagtggaatttctggtccaccttttctggggttggggagcttcccgctctcacgcaatggggtctttgggtgacccgtgtcctggcgcagccctgcggcctcccctgcgtgccctgccctgagccactgttgtctgtctgttgtgcctcaggcagctggctgccagcctctgggaggacgttggcctgcagtggcagaaggagaatgaggaggacctgaaggacaagctggactttgcccctcccaccccaccccattaccctccacatggtgagtgaccgcggcagaggggagcgccaggaggcgagcccttgttgggtgggaaaggggcttctgagcctgaaggaagcttcagctcttgcagttctgagcccaggcggccgcgtcggaaaggtgcaggcgtctccccactgggctggggctcctgcatcctgggcagagcacgtctctcctcagcatctggagagcccccatgtgccttgcagtgacctctcccctcctctggccagctttattttaaaaaggctgtgggcttctgaaagtgtccagcgcactgccagatggtgtccgcccccctccgttggctgtgcacacaagggtgcattgaactctgggttcctgggcagctctgctggtggttggggggtgttggaaacagtgggatgaggggcttatcatttcaccaagacagagctcagcacgagggccacgggtgaggtgaggtcttcttcatggttccacatgatttccaacctgggaacagggtctcctgctgcgtggcctccccgcccttcccacatttgctccctggccatgttgcgggcacccatgtgcatctctccgcagagcccagcaggtctggctgagtctgagtggaggctcccaggtccagccccaacacatttgctctgccacgccgccggcccaccttgggcttcatctgtttagaaaccgccctcctctcgcggggctgagtgtcttccacttgcacgcggtcaagtgctttcatcacttgagtctatctgcggggcatcttcttaaaagtaaataatagatacgcactgacgaggacaaaaagtaggtgaagcgcagcccacatcagatgcccagcccaaatcagatgcccagctcaaatcagacgcccagctcaaatcacatgcccagctcaaatcagacgcccagctcaaatcaatcagatgcccagcccaaatcaagacgcccagctcaaatcacatgcccagctcaaatcaatcatgcccagctcaaatcacatgcccagctcaaatcaatcatgcccagctcaaatcaatcatgcccagctcaaatcagatgcccagctccaatcaatcagatgcccagcccaaatcagacgcccagctcaaatcaatcagatgcccagcccaaatcagacgcccagctcaaatcacatgcccagctcaaatcaatcatgcccagctcaaatcacatgcccagctcaaatcaatcatgcccagctcaaatcaatcatgcccagctcaaatcagatgcccagctcaaatcaatcagatgcccagcccaaatcagacgcccagctcaaatcacatgcccagctcaaatcaatcatgcccagctcaaatcacatgccccgctcaaatcaatcatgcccagctcaaatcaatcatgcccagctcaaatcagatgcccagctcaaatcaatcatgtccagctcaaatcaatcattcccagctcaaatcagatgcacagcccaaatcagatgccctgagagatttgcagtctcaacttacttcccatgtcacctccctggcctagttgaggcgctgaagtagcccggggtcaggtcctggagggaaatgtattccgtcaaatacagcattaaagtagcttcttggccgggcacagtagctcacgcctgtatcccaactacgcggggggccagggtgggaggatcacctgagcccaggagttggagaccaacctgggcaacacagcaagactcctactttacaaatattttaacaaaaacaaaacaaattagctgggcgtggtggtgcatgcctgtatcccagctgctccagaggctgaggtgggaggatcgcttgggtccaggaagttgaggctgcggtgagctatgaccacacccctgcactccagcctgggtgacagagtgagaccccgtttaaaacaaacaaacaaacaaaaaacagtttctcatgtctggtattgatgtttggtgccctgttaaatccacgcctacagagccgtggctcctcccgagcctgtgaatcacagggttgcttttcctcccggtcggcattctccaccttgcagccccaccccacgctgcacagttgctgtacagggaaagcacacatgtttggaaaaggcacagaaattagttgcaagcaaggtttgttctgatggagtgaagccagtgagaacgctcgatctttttttttttttttttttgagacagagtttcactcttgttgcccaggctggagtgcaatgactcagtctcggctcactgcaacctccaacttccaggttcaagcgattctcctgcgtcagcctcccaagtagctgggattacaggcactcaccaccacgcccagctaattttgtatttttagtttatatttatttatttatttttgtttcaataggtttttggtgaacaggtggtatttggttacataaataagttctttttttatttttttattatttattatttatttttattttattttattattattatactttaagttttagggtacatgtgcacaatgtgcaggttagttacatatgtatacatgtgccatgctggtgtgctgcacccattaactcgtcatttagcattaggtatatctcctaatgctatccctcccccctcacctcaccccacaacagttctcagagtgtgatgttccccttcctgtgtccatgtgttctcattgttcaattcccacctatgagtgagaatatgcggcgtttggttttttgttcttgcgatagtttactgagaatgatgattttgaatttcatccatgtccctacaaaggacatgaactcatcattttttatggctgcatagtattccatggtgtatatgtaccacgttttcttaatccagtctatcattgttggacatttgggttggttccaagtctttgctattgtgaatagagctgcaataaacatacatgtgcctgtgtctttatagcagcatgatttatagtcctttgggtatatacccagtaatgggatggctgggtcaaatggtatgtgggcgaaggacatgaacagacacttctcaaaagaagacatttatgcagccaaaaaacacatgaaaaaatgctcatgatcactggccatcagagaaatgcaaatcaaaaccacagtgagataccatctcacaccagttagaatggcaatcattaaaaagtcaggaaacaacaagtgctggagaggatgtggagaaataggaacacttttacactgttggtgggactgtaaactagttcaaccattgtggaagtcagtgtggcgattcctcagggatctagaactaattttgtatttttaatagagacagggtttcgccatgttggtcagggtggtctcgaactccagacctcaggtgatccgcctgcctcagcctcccaaagtgctggtattacagaggtgagccaccacgcctggaccactcaatctgttttaaaatgtggaacttagacacgaggccacttacgaactcactgttgaactcacactcttgtctctgcatcagtgatgggagtggaatcccacgcgtgctgtggtgctctgtcagtgcctctccctccagccgcctgtggtgggcttctgcgttggtcggacctttaagctaagctgtgggttgtttgctcctggtgatttcagctgggctctcctcaccaatgaggaaatgctgctccttagagagggtccagcctgtctgcctaattcatgctacacggagcccaagctgcatggcaaatcgttctccacgtgctcactgagaaaccagtggaagacccttcaggtgtcagtggggcaggaatggcagtccccaagacccaggagggtccagtccttcccgctgtgcaccggagagggaggcggggggtcggggggactgtttctggaaggtacgatctatgatccttggaatgcggtaagggagaagacagagcgaggcgcacacgcatacacacacacacacatattcacatgcatgcacatgtacacacacacctgtgcacacatgtacatgcatatcgcacacacgtgcacatatgcacacgtgtgtacatgcatatcgtcacacgcgtacacacatcctcgcacatgtgcacacccatatacacatctgcacacgtatacacatacacacctgtgcacacacgtgtacatgtatatcctcacacacgtacacacttatcctcacacacgtgtacacacatatacacatctgcacacgtgtgtacatgcatatcacacgtacgtgtgtgtgcacatacatgtacacatgtacatacacatcctgccctaccccgccaactgtctggccctgctagtaggttcccggaaggggcttcctccctgtggtggaaacacaggctctttggaggctgcctgatttagaattggttcaaggacttgggaatgttcctgactgataattacaaaaacacagttagttatccgtgccgaggcgtagagagtgtcgttaggcacagaacttttgtttcaagtggagcagagtaaatttagaattgaatgacagtcagtcagtcgcataagcactacgttgtgttagatttttggcattttctcctcaaattacttttctccagtctgtagatttgaattttaaatacgatttctcagatttttttctacagtattttaaatgtcagatcagaagattttttgagtctcttcctcagaagtttgcactggccctgtattgccaagcacacaccctccctgccgtcctgccaccccccgcctgccgtgcccagggtctgtgacgctctccttactgtcttgcccccccctgcccgctgggcccaggctctgtgtcctcactttcccccgcccgtcatgcccagggcctgtgacgccctccttaccgtcctgctgccccccacccaacatgcccagggcctgtgacgccctccttaccgtcctgctgccccccacccaacatgcccagggcctgtgacgccctccttaccgtcctgctgccccccacccaacatgcccagggtttgtgacgccctccttaccgtcctgccctgtccagcgtctgtgtcatccctttcccccgcccgccgtgcccaggctctgtgtcgtcccttttccccgcccgtcgtgcctagggactgtgacgccctccttacggtcctgccaccccccacccaccttgcccagggtctgtgacgtccttaccatcctgccaccccctgcccaccctgcccagggtctgtgatagcccttcccccgggaccacgctgcattcacccttcagggctgcagctctgtgagttttgagcagcaccgcctctgtcccctgcatgtgggcatctccaccgcccagaactgctcatgggccctggcactgctgctgtgggctgcgtcctgtgtgtcccttccaggatgtcacttgcatgaggttgtgggagcgtggccgctggcgtctgctctttcctctctgtgtcggaggctcatgcatggcacctgtgtctgcagcactttccttcttcgcgtgagtcacgttccctcccgtggatggaccatctggtcaccagcaggggcatattcgggtcctttctagtttttggccatcacaggtaaagctgatgtaaacacttgcagactggtttttgtgagagtgttttattggataaacactcaggcgtggggttgctgggccataggtacagtccttactttgttagaaactcaccacacactgttttccacacccttcgcgccatgtcgcatccccacgggcactggatgagatttccaggtgctgcagtcaggccagcgtgtggggtggagtttgctgtttttagtgtgtcggttggtgtgcagtgttggcacacggtgttggtgtccagtgttgacacacggtattggggtttgctgtttttagtgtgtccagctggtgtgcaatggtggcacagggtgttggtggggtttgctattttcagcgtgtccggctggtgtgcagtggtggcccacggtgttggtggggtttgctgtttttaccgtgtctggctggtgtgcagtgttgtcacacagggttggtggggtttgctgtttttagtgtatccagctggtgtgcagtgttgtcacacagggttggtggggtttgctgtttttagtgtgtccagttggtgtgcagtggtggcccacagtgttggtggggtttgctggtttcagtgtgtccggctggtgtgcagtggtggcccacggtgttggtggggtttgctggtttcagcatgtccggctggtgtgcagtggtggcccacggtgttggtggggtttgctggtttcagcgtgtccggctggtgtgcagtgttgtcacacagggttggtggggtttgctggtttcagtgtgtccagttggtgtgcagtggtggcccacggtgttggtggggtttgctggtttgagcgtgtccggctggtgtgcagtggtggcccacggtgttggtggggtttgctggtttcagcgtgtccggctggtgtgcagtgttgtcacacagggttggtggggtttgctggtttcagtgtgtccagttggtgtgcagtggtggcccacggtgttggtggggtttgctggtttgagcgtgtccggctggtgtgcagtggtggcccacggtgttggtggggtttgctggtttcagcgtgtccggctggtgtgcagtgttgtcacacagggttggtggggtttgctggtttcagtgtgtccagttggtgtgcagtggtggcccacggtgttggtggggtttgctggtttgagcgtgtccggctggtgtgcagtggtggcccacggtgttggtggggtttgctggtttcagcgtgtccggctagtgtgcagtggtggcccatggtgttttactttgcgattccctaatgagaggacattggggccttttcctgtgctgtggtgtgcttctgtgcacccgtacgtcgtctttggtggccattcagaactgccatccattaaatcgagttctgtgtttctgagtgcggagtttgaggaccccttccgtgctctggatgcaggtccctcatcagactgttttaggctccacagccaggcctcagctccagctcccgctcctctcctcagagctccggcagctgccgcccccatcccccctgctctgtttcctcctgccccctaccacagtggaggtgctccttctcctcggtggactcgggccctgtgctcacctcaccgctcgctccaggggccagtctgtctgctgccatcctctgcacccagaggcggtgagccaggcttagtggctctgtgagcacccagcgagctgatgagtggctgcgtgtcctgtcttaccagcaagaacggacagtccaaccgtgtggttgggttgccgagtgcgtgaacaggcaaagttcggtaatattttcagaccactgctaatgcagacggtgctcagaggtaatgacctatcaataaggaattcacatgggcctggatctgaagtttcatcagagtccagttttcctgtttcctaagaaaataaggtacacaccatgtggaaatataattcgtaccatataatttgttgttagctttgcagacacagcgtaagtttccattaacagcactgaaacctccgccttaaaaaccaagcttcgtgctgggagggttgggagggcaccacttaccgtcctcaagtcggtcatttccctgaacagagtgcccttctcacacggaagcacacgttcacgcctggtgtgtatctgacaatcacactgccagccgccagcagcagatggcttggtgacagcggctccagagtcctttctgctttgagattatccctctgttaagattgttttccttggcaatgcctgagcgtaaaggaaagcgtctcgatgctggtgagtggccggccagagcttttcacacaggaggacagagttggctcttcttaaagcctgacttagaagtgagcagggttccctgtggatgaacgctgccacgtgacagccttcccccttcattctcctgttctgccttggagctcgcacccattctgctttgcttgtgtgtttcatccatgtgtttggaaagatggaagcttgaatggaaattgtcagaaacgttacgttgtgcaaatgggctggaaaagctggttaacattgtttgaagccagcaaggtcccacgagcattggcccactctgagttagccgggggtgttacagaagaaggaacttctttttctttttttgaggcagacttgctctgtcacccaggctggagtgcagtggtgcgatcccagctcactgcaacctccgcctcccagattcaggcaactactgtcctgcctcagcctcccgagtagctgtgattacagacgcgcaccaccgcacctggataatttttgtgtttttagtagagacagggtttcaccatatcagtcaggctggtctccaactcctggcctcaggtgatccacccgccttggcctcccaaagtgctaggattacaggtgtgagccacggtgcccagcctatgtctgctataatattaagtatagaaaaacaggcttcagaaccatgttcagaagcatgtgctgagtaacagcgtttgagtccataaggaccacgtggaggagggtggtcccctctgatagtaacattgtgtttctcctttttctgtgtttggaaacactcactcactgtctgtgctacagtttctgcgtgttgagtgcagtcacctgctgcacaggttcgtggcctaggagcctcacaggctatatcgcacagcccaggcatcgcacagccaggcacgtaggaggctgcgccatctaggcttgtgtacgtcactgtagtacgttcacacggcaacgaaatcacccaatgacgtgtttcccagaacgcaccccccaccgttcagcaacgcttgactgtaccagcggtcccctgccattttggcaccagggactggttttgtggaagacaatttttccatgggtggggcagggagcagggtggtttcaggttgaaattgttctacctcagatcatgaggcattcaattctcataaggagcacgtaacccaggtccctcacacgcacagttcacaggagggtttgccctcccctgagaatctcatgccgccactgatctgacaggaggtggagctcaggcggtcacactccttcaccatctgctcacctcctgctgtggggcccagttcctaacaggccttaaaccagtcccagcctgtgtccaggccttgcgtacccctgcccagcaccggccagtatttctttggaaacacccagaagcccaggtgcccacaaagctctgttcagctgtcagcagacccctccccggctgttcctggtcacgcatctctcattttgcaaactttccagagcggatcgtcatcaggaagaaaggtgcagctgggcgtggtggcgcatgcctgtaatactgaggtcaagagttcaagaccaggctggccaacatggtgaaaccccatctctactaaaaatacaaaacttagccaggtgtggtggcatgcacctgtagtaccagctactcaggaggctgagacatgagaatggagaattgcctgaactcaggaggtgaaggttgcagtgagctgagatcgcaccattgcactccagcctggatgacagagcgagactgcatttcaaaaaaaaacgaagagaggtgtgtttgcaccctggcttttttgttttttacaaaatgatgacaggatcatttaaacagccagcagaattttaattatttggaactaattccataatacaggataaaaacagaaaaataaccagaaaaaggttaaaaatggggtgtcctggtacaagctgttcttattaaaacataccctttagcctggatgcagtggctcacacctgtaatcttagcactttgagaggccgaggcaggagggttacttaagcccagaaggtcagtgctgcagtgagctgtgatcgtaccactgcactccagcctgggtgacagagtgagaccctttctctaaaaatagaaaaagaccctttaaatcctgacatatcatggtttcatttctatctttacagttgttctgaatttttttttttttttttttttgagatggagtctcactctgtcgcccaggctggagtgcagtggtgtaatcttggctcactgcaacccccacctcctgggttcaagtgattctgctgcctcagcctctgagtagctgggattacaggcgctcgccagcacgaccggcttattttttctatttttagtagagacggggtttcaccatgttagtcagggtggtcttgaactcctgacctcaggtgacccgcctgccttggcctcgcaaagtgctgggattacaggcatgagccaccgtgcccggcctgaattttgaagatcagaatcttttcatcaaagtccctgaaggcttttctgtagaaatcgacaaactgattgtgaaattctcgtgggcgtgcaaaggacccacagctgccgaaacactggggaggagtgaagctgaatggcagcaggtcctgggtgcaagactcacaaaaccacagtcatggggccacgtggtgttggctttcagaccgatgagcagaacgagagcgtccagaaacaggcgcccgcacgcggaccactgacttgatgaaggctcaaagaccatttaatggcatcttttaataaggatactgtaaatgataggatcactcatacaccagaaagtgaacttggagtcaaaaaattaaccccagatgcgtcagggatctgaaggtaaagcccagaaccgcagagctagggcgaagcctttgtgacagtgggccgggccacacttcgtgggatacgtcctcaaaagaccgcagagtgatgacgaagcctttgtcaccgcgggccgggccacgcttccctgggtgcatcctcaaaagactgcagagtgacgacgaagccttcgtgaccacgggccgggccacacttcgcgggatacgtcctcaaaagaccacagagtgatgacgaagcctttgtcaccgcgggccgggccacgcttccctgggtgcatcctcaaaagactgcagagtgacgacgaagccttcgtgaccgcgggccaggccacgcttccctgggtgcatcctcaaaagaccgcagagctaggacgaaggcttcgtgaccgtgggccgggccacgcttccctgggtgcgtcctcaaaagaccgctctgtaacagggtaaagcaatgtgtggacttcatcaaaatgaacacttctgctttttcaaaggcctgttgaaaaaacgaaaagacaaaccaaagactgagatgtttggagatgatgtatgtaaggatttatctccagagtataggaagagctcttgaaactcagcaggaaaacaatccatttttttaaatgggcagaaaacaatttggaaagaccctttaccagggaagataggcggcaaacaagcctgtgaagaagacgctcggcgtcgttagtcatcggggaatgcaaaggaaaagcacacggaaatgccactgtgcctctcggactgctttcaattcaagactgagcgtaccgcgtgccgctgagagtgggaaggagcgcggactggctcaaacactttggaaaatggttggacagtttctaaaacagttaaacgtgcaccttccctgtggcccagcccttccacagctggtatttgtcccggcacagtgaaagcccaggccacacagacttgccctggacaccatttgaatgcttctccacagaggagcgggcactaaactggcatctccccagaacaggccacttcccaggttcagaaaggagcgggcacaggcgggcctcagaaaacgatgcagagtgaaagaagcggagaagggaggagagtgaacgagaggcttccacttgtgtcaggctctagaaagtgcagctcagtcacgggacagatccaggggtgccggggtgccttgggggctgcagtgcagaggagcagaggaagccgggcgaaggacgcagctgtcacccccaccatgccgatggcttcgcagccgtgtctctcatatggcgatggcttcgaaggcatgtctctctgatcatatggggacggcttcacagacgtgtctctcatcatatggggacggcttcacaggcgtatctctgtcatcatatggcgatggcttcgcaggcttgtctctctgatcatatggggacggcttcgcaggcgtgtctctctcatatggggacggcttcgcaggcgtgtctctctgatcatatggcgacggcttcgcaggcgtgtctctctcatcatatggcgatggcttcgcaggcgtgtctctctcatcatatggggatggcttcgcaggcgtgtctctctgatcatatggcgacggcttcgcaggcgtctctctctcatcatatggcgatggcttcgcaggcgtgtgtctctctgatcatatggggacggcttcgcaggcgtgtctctctcatcatatggcgatggcttcgcaggcgtgtgtctctctgatcatagggggacggcttcgcaggcgtgtctctcatcatatggcgatggcttcgcaggcgtgtgtctctctgatcatagggggacggcttcgcaggcgtgtctctctgatcatacacgtcagcacgtgtggcaagtgtgttgtttgcatctctgtgtggctctaaatgtttgttttttgagacagggtctcgctctgtcacccaggctggagtgctgtggcgcaatcctcccacctcagactcctgcgtagctgggaccacaggcatgcaccacggcacctggctaatcttcctgttttttatagagatggggtctttgccatgttgcccaggctggtcttgacttcctgggctctagtgatccacctgccttggcctccacagggctaggactgcagccgtgcaccgcctctgtgaatgttctgaacgacggggcatttgtcagctttgcgtccaccccaagacttgttttgaaatggtgaggttgaaactcacaggtgtcccttaaatgtgatgtgcggtaacttgagttgttgaggttttgcttgtgaatttctcattcttctttccctttttcgttccagagcgccgccctgtgctgggctgccgggagctcgtcttcaggaacctctccaagatcctccctgccctgtgccacgacatcaccgactgggtggtggggacccgagtgaagtcggcacagctgctcccagtgctgctgctgcatgccgaggaccacgccacgcagcacctggaggtcgtcctccggaccctgttccaggcctgcaccgacgaggaggcagccgtggtccaaagtgtaagtggccgtattccagtcgtggtcgcggagctgtaactcgagcttaagatcccgcctctgtggtgtgcggggcccgaggctgtactgtagccaagacagcgttcccctcacccccgggccgcaggccctccccacacccagcccctgggaacaactgatctcctttctgtgcccgtaggtaacagcgtgttgagggtgaacccttcatgctcattttcaagcacactcgggggtgcagtgccaggtgcatgttgtgtagacgtgttgtgtagacgtgccgtgcaccagacagacagggcccgggctgctgacacaggaccgagatgcccagcgttcagcattgacatctggactgtcctgagggcccttccaggcctcgcaggggctgtgggagcacccagacgggggatgatggcacagcttcgggtgtcctgcgagtggtgtccctggtgcagtcctctttctcactccctgtccacactcggctgctggttatcgcctcgtcaccactgggtacgcacgagggagtcccatgctcaggcctctcctcctcactaggccgggccacgccctgcgctgacagtcaccaccatgaggacttcacacccacctcacaaggatgcttcctagtgctcaggagaacaactaaagctttgacttgagatttcagttgaaaatatcctcatcttgaaccttaaattccattgcaaggtagcctggccagcagcttttacttctagtggtccaggtcactgttactagcccagcgtagtggcgtgcacctgtggttccagctcccgggaggctgaggtgggaggatcgcttgagcccgggagtttgaggcctcagtgagctatgattgcgccactactctccagcctgggcgacggaatgagacgctgtctcagataaaacaaaaaaatctaaatcattgtgactgatttaaagtaaatgttccaggttccatgttatttacatgtcatgtttctgcttttcaaaaactaccgtgaatttaaaattgtctgtagttctctgtggaacctacaggagagcaagagacacgggggtgaggctgagaggacgagagacgtgtgtgggatccgctgtggaatcccacggtgcagaggggctggtgtgtgtgtgatccactgtggaatcccacagtgcagaggggctggtgtgtgtgatccggtgtgaaatcccacggtgcagaggggctggtgtatgtgtgatccgctgtggaatcccacggtgcagaggggctggtgtgtgtgtgatccactgtggaatcccatggtgcagaggggctggtgtgtgtgtgatccgctgtggaatcccacggtgcagaggggctggtgtgtgtgtgatccgctgtggaatcccatggtgcagaggggctggtgtgtggtgtccactgtggaatcccatggtgcagaggggctggtgtgtgtgtgatccgctgtggaatcccacagtgcagaggggctggtgtgtgtgtgatccgctgtggaatcccacggtgcagaggggctggtgtgtggtgtccactgtggaatcccacggtgcagaggggctggtgagtgtgtgatccactgtgggcttccacggtacagaggggctggtgtgtattgatcagcttagtgatgggaaggttgggtcactggtgtccgatgaggggtgtgtggtgaaccccacagctgggacacagcatcctttgggccagacttcactgcctgggaggcgtgtccggctcgctggcctcagggacgttctgagaccacacccggacccttgtacctttcctgagggctctgagcatgtgccaaggactcactctgcctaacacggggctctgtctggtgcacggctgtgtctgggaggccacggcgccgagagcaggagcccggctgagaccctcgggtttggctctgagttttctcatgtttctttctcgcagtgtaccagatccgcagagctcgtcgggacgtttgtcagccctgaggtgtttctgaagctgatcttatcgacgctgaagaagacgccctctgcctccggcctcctggtgctggcctccgccatgcggggttgcccccgagaagccctccagccgcacctggcagccatcgccacagagctggcacaggcccacatctgccaggcatctgaaaacgtaagagcacttgggagatgcgggagtggagaggaggagcctcccctgcccggccgtcagccatcgtaatgacatgtctgtgggttgccctgtgccgccaggctgggctgtcggaagcacccagcgacgtgtctgtgggtccgccccgtgccgccaggccgggccatcggaaacacctgcagtaaccggagtgccctcgctgatagcccttgttccggggcctcgtcctgggctgtgcagagctccagccccagccccagccccagctgcaggcggccgctcacgtttacattcgttgctgcccctttcttggccacacaccacagttcacgtgtttgatgactcaggaggcgtccatggccgggaccctctggcccatgctgctgggggtagatgtggggtccacgtcatcccacccctgaggagcgtggtcgcacgtccaccatcccatccagtccccagggtacctgcacagatcgcacgtcctcagggggcactgacagcctgttccccatcagccctgcctggcgttccgatctgtgcttctcacagcccagctgaggatttgccagagacatttgtttaattttaaattgagcagcaaatccttgagctcagaagctggaacagcctgggtagttgggctcaattgtttggaataatccatagttgtattccatggaagaagaggtgatggctttgctttcatttgaaggtgagtggtccctgtcagtgtgtgtgttggactcagcaccccagatatttctgggacacagggctgcccccaccaggcggccgtgccatgcagggcgggcctcagctcacccctggaggcacttgctccggctcgatcgtttccggcggcttctatggccccaaagctggcctggggcacggggacttgccactgtgctctcagcccggcctgtcctgtgtcaggctccctctccgtcctcagaacgagaggtggggctgttgacagtcatttttgtaaactgttttaagaaacctgtaagcagttcctggaatacatagagggaaggaaacggagctggggtaaggaagggagcgggggaggggcccgggccgcgtgctcatggcatttcagccatgcttcagcttttcccaaaacccgtttttaacacatcatcgaatgtgtgtcagttctccactttccttcacccacgaggggttatgaggatgcctttgatttctgtatacagatttgcaagccagaagcattttttcctagaagggcataacttgaaaatgtgcacaggtgcctaaatccttatctcacaaactttatagcaaagaaagtgtagttttcacatctccatgttggttacaggaaaacggaattgtgtcatcccacagttgtgcatttggctccccatcttccagttttatcgaggaaaaatttaatcacaatctttcaaacagagacgtctttctgacaaagtccagtcacacgggacccctgggaagccagcctcaaccttccaggctgcgaacgtgtgtcggccctttggccaaggagccagtcacagtgaaaacccaagacgtacatttcactcctttcttgtttttatttttttgttttaggttgatcctcccacctcagcctcctgagtcactgggactacaggtgtgcaccaccacacctgggtaatttttttttatttatttttatttatttactttttgggacagagtcttgctctgtcacccaggctagaatgcagtggcgcaatcttggctcactgcagcctccgcctcccaggttcaagcgattctcctgcctcagcctcccaagtagctgggattacaggcatgcaccaccacacccggctaatttttgtgtttttagtagagacggggtttctccatgttggccaggctggtcttgaactcctgacttcaagtgatcagcccacctcggcctcccaaagtgctgggattacaggtgtgagccaccgcacctggccccattttactccttaacagacttaaatttttggcaagaaagggtgaaggtactcaggtctcagtcagaatcaggcccgtggttctgtgctcttcccacgcccctgtgctcttcccgcggccggccgggctttgtgtcatgtcatttgggaagtcgattatgtttcccacagctattctccagtagctatgagaacaggttgaaaatgtctttcaagaacaaaccgaaattgttttaaaagctcgtgtttaaacagagaagtccgtgtaaatgtattctaaactgagcctggcttcactccctgccctggggttcacaggaaatctggctttagcagtaggtacttccaggtgtctcgggcccagtaggtcccctagagctcgacagacgggaactggagtctcctgggaaggagtttaggacaggtgtctagagtgaggaaatgggtaactcaccgatttgcttctcacacagggaagccagcagttgtgggatgccattgccattgttgaaataggagtctcttgtgcttttctgaattaaaaacctttgcagtcttagataacattgtttcagaaaacaatgtttgaaatagtatttcaaaaaatactgagaattatttcctgctgtatcttttttctttttcgttctgtgtgtgtgcgttgtatgtaggcagacactgaaaattgtctggtcaaatatagagaaatctataaatgtgaagtcttgtcacttcctcagagacggtgctgcgttcgtggcaggagggtggtgcttgctgcaaaggatgcctgattccctgtttgttcctgtgcttggaggtgtggtcagccaggaggggctgtgtcttctaaacgcacctgccttttgattttaaccgaaaagatgatcgctcctgaaatgtacatgacaggtcattctagaaactagccagatattgtcctcagaagtcagccagttagtacaggccttagagaaattgggctgtgggaaaaatcaggaatggaataaaaacaaatctgtggcttctgtgggagttggggccacgacagggccacacggctcctccagctccgagggagacggggccgcgcggctcctccagctctgagggagacggggccgcgcggctcctccagctccgagggagatggagccatgcagctctgtgtcttctgtgggtcagggcggggccggggtgcaaggacagaacgctgctgtagtacagtgggagtgttttgtttagtcttccatgatttacgtcagtggggaatgaggcttagagttttagagctgattaggaaatttagaaccaacccattgtctagccaaataattaccaaacttctttgaacttgcacccccattagtaaaaacagtttttaagcataggcctccaatatatgtacactgttgataaatcacgtgtttaaattacatggccacggtcctgactcactctgtactttatgaaacatacataaaatagacattagagggacgttataagaagtaaatacaggccaggcgtggtggttcttatctatgatcccagcactttgagaggccacggcaggaggatcacttaaggctaggagtttgagactgcagttagccacgattgcaccactgcactccagcctgggcgacagagcaagaccctgtctctaaaaaataagttaaaatttatttagaaagaagtaagcacacgcaaagccttaggaattcttgggtccagcacacgcctgctgtgttgcgggcttcagagcctggctgattcacagtggatgaggctggagccgggaggggaagccattcatccagcgcagccgtaggtgcagagctgagactccacctccccgtcaatcagtaaacatgttaagccatagaattttatttgtcttaaaacttggtgttatagaaaagctcaaaaatgcacagaagaggggcaggcagcagagcgactgccagcttcagcgctgaccagcccttggcatgcgtgttctgcctgcctggggccacttttctttttaactttggagggcggggagaacttgggcatgttgtaaagcagataatgcagtgcgccgtcatttccctcacaggtgccgtgtgcatcactaacgcagcttctccaccacatagctcaagtgcctgttcacatttcacaaaataagcacagattccttagctcccagtctgtgttcagttttcccatcaacaagcacgcccttttatggttgacatgccggcaccctacctccagcgcctgggggctctccctgcaagggctctcccatggctgctgcccctcgtgagccgtagactaggagccccgggcgggctctgtcggccctgacactggggccggagcgggagccctgtattagtccattctcatgtcgctaataaagatctaccacagactgggtaatttataaagaaaaagaggcttaatggactcaaagttccacatggctgtgcaggcctcaccatcatggtggaaggcaaaggaggagcaaagtcacgtcttacgtggcggcaggcgagagagtgtgcaggggaactgccctttatactaacatcagatctcgtgagacttaatatcaagagaacagcacgggaaagacccacccccatgattcagttccctcccacagggtccctcccaggatacgtggggattatgggagctacagttcaagatgggattcgggtggggacacgaccaaattgtaccaagctctgacggtgctgccggtctcttccaggacctctacctggagcgcctgctgctgtgtgtgcaggctctggtgtctgtgtgtcatgaggactgtggcgtggccagcctgcagctcttggacgtgctgctgacaatagtggccctcgcaggtgctaccggcctgagggacaaggtaaggctgacagtggtggctgctgcttgacctagcggagctcacagctggaaggcatctctaagtgaggtgaactgtctcctatgcatcccctctgtgcttgaccagcaaagaccagggattgagaaccttgcgggtgagtccccgggcaacggccttcggggcagctctccagctgccagtgtattctggcatcagggagtggagacagctgtttaatgttagggtcttcagcaaagaagcaaacaagaaataagacgtaacctttaaacctgcgcacttgagtagggtttaatagtgcacatgtcgctgggcgtggcatctcacgcctgtaatcccagcactttgggaggccgaggtgggcggatcacctgaggtcaggagtttgagaccagcctgaccaacatggtgaaaccccgtctctactaaaaatacaaaaaattagccaggcgtgttggcatgtgcctgtagtcccagctactcaggaggctgaggcaggaaaattgcttgaaccagggaagcagaggttgcagtgagccaagatcgtgccactgcactccagcctgggctgagcaacagagcgagactccgtccaaaaaaaaaaaaaagtgcatgtgcatgtgtgactgagtcgagagaagataccgtgatttcccgctctcattgcagcacagcgttcagaagtacttctcgcccatgggctccctgtttatgcccaaaaatcatcttttttcttcagtggagtctcgctctgtcacccaggctggagtgcagtggcgcgatctcggctcactgcaacttctgcctcccaggttcaagtgattctcctgcctcagcctcctgagtagccgggattacaggcgcccaccaccatacccggctaatttttatatttttagtagagacaaggttttgccacgttggccaggttggtctcaagctcctgactgcaggtgatccacctgcctcagcctcccaaagggctgggatcataggcatgagccaccgcacctggccattatgcccaaaaatcttttaaccccaaccttctaatgggcttctagggcccctggaggccccagtatctgtctgcctctctggaagctgagacttagttcctcctcccattctgtctctgtggacagcccctctcggcagattctctctctgggagatttacggcctgaatgtactatggggaacctggtgtggaggaggctgctgccctccccttccttcttggggcctctaaaaacaagcttcccaaggggcgtgtgtctcagcagatgctgtcactgttagggcctgaggtaccagcaaaagcaaagtctttgcctgctggtcatgggggacgaagccaggtagccccagattcagactccaggcttggggcaatggccaccggggagcctcagcccttcctctgttcctaagcccccaaggagagcagccagctaaaagtaaaaggtggccaaggttatcatctctgtctgcccagttacttttacctggaggtctggtctgctgggcttaactctttaagccacttgcccgcccctctctgctcctcaccacctcagaggagccctgcctgcccaggcggacaccacgtccgtgtaagccccaggaccacctgtgctgtgtgcatcccagtgtgcacagtgcctgcttcatgattcgctgcagagacggcgttggtgtgaacgggatcagggtctcgccctgcacccgcggctctcgctctcctgcaccctgggcggggctccctgtggcagcctccctcccgattatcctggcaggcccggcctgtgtggttcttacgcgtgagggggatagtgagtcccagcaggcaggcaggcttgagccctgagtgttggaattgtctcagtctctgacttgtaacctccaggcacaggagacgatggactcactggccatggtggagggtgtcagcagctgccaggacctctaccgcaagcacattggtcccctcctggagcgggtgaccgcgtcgcaccttgactggaccgcacactcgccggagctcctgcagttcagtgtcatcgtcgcacagtcaggtgagccgtcccgacagctggcgtgccgtgcctggccccactcaggctacacacctgctcccccaggtgctcagcaggtaccagcgccgaccagctgagctgtggttcactgaagcgtgttgttaaaagtacccaatagtcactcttgcctggggagaagcagcattttaaggagcatcgcattgaagactgtgggacgcagctcttccacttggcccgggcacacgctttcatgtgaaaccttcaaagtgtgcttttccgtggcctgttttgtagcctggcttcttaaatacgtctggattttgttgcagaatctagatgtctagccgcatgggtgctgtgtgtgtgacatgggggccttagccccagcccctctgagaccagcatttctgtggttctctttgagcctgcggatcagccacttttcctgggatggacagtgtggcccagtggggcttcagcgcggggcaagatccactgcagaaccctaaggagacgtccgctcagcagccatagtgccttgggacacacggcccgcgctgctccacgggccgtgaactcgccgcggtagctcttcctcgtttgcctccccggccctcccgctcccgcctgcagctccgagtgcccccgcctcctgttggatgtgtgcaccagggtggtcgtgctctgcatctgaggatgctaagatcgttcttacacaatctctgtgcctggtagggactcaccttttttttcctgagacttggaaaaatacccaaaattgttctttgtcagttgcattcaaaactgtttccaaattagaaaagaaaatactggctgggcgtggtggctcacgcctgtaatcccagcactttgggaggctgaagtgggaggatcacttgagctcaggagttcgagaccagcctggccaacacggcaagagctcatctctacaaaaagatgaaaaaaaccgcacgtgcacctctgaatctaaaatttaaaaataaataaaatacagttagccaggcgtggtggtgtgcgcctgtggccccagctactcaggaagctgaagcgggaggatccctggagcccaggagttcgaagcttcagtgagctgtgactgcactgctgcactccagcctgggcaacagagcaaggccctgtctctaaaaccaaacaaaaaacaaagctggcgattgctgacgtgcactcggggcattaaacactttatgccagacgctgctctgcaagccttagggccgtcagctcatctaccctcacagccggcctgtgtggtgggaactgtgaccccgtttcacagacaaggaggcagagcacagagaactcccgaggcagcgactccagagcctccctcagcccctctcccacgggcctcttggatgggggcccagggtgttgcatttcagatttttactgaatgttactcctaacaacctcttgcaccaaattactccagccttcacctcacagtccagaaaattgggcacacaaaccccgagagacgtggcttgcagtgaagccaggacttgcatttactgcagctctggtggcttctccaccatctgttcttcctctttgcagaagcatttcttatggtgttggcggaactgattggcagcttggaacacacatctctttgggcccacatctcctgtcattcactgaaaggcaggaagactgcagtatgccgttcagtgtcaagagctgggtataaaactgtatgggtttttttgttttttgttttttgagacggtctcacgctgtcacccaggctggagtgcagtggtacgatcacagctcactgtagcctcaaacttccgggatcaagtgatttttctgccttagcctcctgagtagatgggattgtaggcatacgccacctggctacttctgtatgtttttctagaaatggggtcatatatgctgccaggctagtcttgaactcctgggctcaagcgatcctcctgcctcagcctcctgagtagctgggaccacaggcacccactaccacgcctggctaatttttgtattttttgtagacatggggtctctttatgttgcccaggctgacctcaaactcctaggctcgaacagtcttcccacctcaccctcccaaagtgctgggattaacaggcataagccaccatgcctggtttaaaactgcatttcccaatgatgattatgttctctgagccccatctgagcgcacacatgtgtggtgctcttgggagtcgggggcacagcctcaaatataatacaatatttccaacatcgtgtccttggaatacagatgatttttattttcttctttatttttttctatgtttttctaagctttctctaatgagcatgcactactgtaataaacagaagacaaaaggattaaaacaattttttaataggagaaatttttaaatttctcatttacaaaagttctatgggaagataccttttaaattttaattattttaaacatacagaaagggataatttctaaactttgagaggatgggggatctacaaagacattgatttgactatatacatttgaaccaaaataaaaggaacatagacttaggaaaatatttgcaataaggatgacagtgtgagatctttgttacataaagctgacacaaaatgagaacaaaagcattaagagttgggcacggtggctcacgcctataatctcagcactctgagtccataaccgagcagcctgctctgatgatagaggctgaggcaaggaggctcacgtgagctcagaaattgaggcttcagggagctgtgattgtaccactgcactccagcccggacaacagagagagaccatgattccaaaaaacaaaaagcattaactcccaaacaaacaggcaaaatatccacattttataaaaaagaattaatacaactaataagcaaatagagtgggaactatccagcccttctagtgatgaggaaatatgaattaaagactgtagggtcccgctgggcgtggtggctcacgcctgtaatcccagcactttgggaggccgaggcaggcagatcccgatgtcaggagatcgagaccatcctggctaacatgatgaaaccccgtctctactaaaaatacaaaaaattagctgggtgcggtggcgggcgcttgtggtcccagctactcgggaggctgaggcaggacaatggcgtgaacccaggagacggggcttgcagtgagccgagactgtgccactgccctccagcctaggcgacagagcgagactcggtctcaaaaaaaaaaaaaaaaaagactgtagggtcccatttcttcatttatccaattaagtgaaatagctgctgcctagggtggctgagctgggagtgccaaggtgcttttggaaagccgtgggacgctgcgcatctggaattgccaatgtcttcactcctttcatccagcaatcacattcatgagaatctatccttccaattctaattatggaaaaagctatgcacccaaaaatatgcatcggggcataatttaatagaaattgtaagtgacccaaatacctcatacgaagttaaatacataatgatatttccatagaagaaatgctctggcaaccattaaaaacaattatcctaagcctttatagcaaaatgggaagacaggtgtggtgtgatatggagggaaagtgaagccagtgcagaagtgtccgtgctgcaagcaggaactcgcactgggaggggagacacgtgatcagggcggaagtgtccgtgctgcgaggcggagctggcgctgggaggggagacacgtgatccgggcggaagtgtccgtgctgccagcaggagctcccgctgggagggcagacacgtggtccgggtggaagtgtccctgctgcgagcaggagctcacgctgggagggcagacacatggtccggtggaagtgtccctgctgcaagcaggagcgctagtgctgggagggcggacacgtggctccgggcagaagtgtccgccagcaggagcgctcgtgcttggaaggtagacacgtggcccgggcggaagtgtccttgcagcgagcaggagctggcgctgggagggcagacacgtggtccgggcggaagtgtccgtgcagcgagcgggagctcgcgctgggagcggagacaggtgatctgggcggaagtgtccatgctgcgagcgctcgcggctgggagcgcagacacgtggtccaggcggaagtgtccatgctgcagcaggagctcgcactgggaggggagacacgtgatcagggcggaagtgtccgtgctgcgaggaggagctagcgctgggaggggagacacgtggtctgggcggaagtgtccgtgctgcgagcaggagctctcgctgggagggcagacacgtgatcctggcggaagtgtctgtgctgtgagccgcagctcacactgggagggaagacacgtggtccgggcggaagtgtctgtgctgcgagtgggcgctccggctgggagggcagacacgtggtccgggcggaagtgtccgtgcagcgagcaggagctcgcgctgggagggcagacaagtggtccagtggaagtgtccgtgctgcaagcaggagcgctagtgctgggagggcagacacgtggcccaggcggaagtgtccacgcctacctcgagcaggagcgctcatgctgggaaggcagatgggtggcccgggcagaagtgtccgtgctgcaagcaggagcgctcatgctgggaaggcagacacgtggcccaggcgtcaggtttgaacattcttgacagcaagtggctcacccgtcagcgtgcttctttttcccatcccaggagttggacttgacctgtggacatttggctgttttctttttgtttttaagccagaaacactgtcttgtttccagtttaagatgtagagagggtgaaacagtcagaaactgggtcagaagcagcgtggttctcgtggcagggcggcacttggcccaagactcgtgctctggcgggaggctcaagtcaggcgtcccagcagcttcggtgcaacgcctcctgcccggctgcgtggggaggccctccaagacaccagctggtctcaccgcgaggcctgacttcgagccagagcagcgagtacattgcgtctccgtgtggcaagggcaggtgcgggggtctcagtccactaccgagcagcctgctctgatgactggcggcgccagggagaaggctcacatcgcgaggtccccagcaacggctcaaggtgactcacagttgcttggataagccagtggacgctccctctacactggcccggggccagagcgcctccttctgcggccccaacccagtccccaccctgagccttcagctcctgggcctgcaggctgagcctggcaggagacgctgcagggactctcagagctgtccttgccctgtcattcatggagacttacagggaggcggggcggccctactgcagtggggaccccttggggcgtaggatgcacagtgcaggcgcccaagcctcgcgcccaccggagagcagccacggtgcaggagcttggccctgagtgtgggcggggtgagggctgcaacgctgagaagcagatattaaagaagttctttcactgaaacaattgattttggtcgttgtttcaactattgcttgactttaatttttcaaaaaaatttagaaaagtttaagaaaaatggaaggttgttttgtttttgagatggagttttgctcttggtgcccaggctggagtgcaatagtgcgatctcagctcaccgcaacttccgcctcacgggttcaagcagtcaagcagctgggattacaggcgcccaccaccacgcccagctaattttgtatttttagtagagatgggatttttctccatgttggtcaggctggtctcgaactcccgacctcaggtgacctcaggtcacccatcttggctttccaaagtgctggaattataggcgtgagccaccacgtccaggttttgtttttgtttttgtttttttgagacatagtctcactttgtcacccaggctggagtgcagtggcacgatctcggctcactgcaacctccacctcccaggttcaagtgattctcctgcctcagcctcccaagtagatgggactacaggtatatgccaccatgctagggtaatttttgtatttttagtggagatggggtttcaccatgttgaccaggctggtctcaaactctggacctcaggtgatcctccctccttggcctcccaaagtgctgggattataggcatgagccaccatgcctgaccaaataggttttcatatggaaaaacgtgattttggggggttaaaattttctgctgcttttctgtgataatcaccttactgattgagaaagaggaagcggggaggtggtggccgatagtgccctctcccaggtgggagcgcctgagcctgggcctgtgctggatggggcctcctcccgtctcctgagggccgtgcacaggagcctctgttgtgtcttacaggccctgccctgggagaagccctgccacacgtcgtgcccacgctgagggcctgtctgcagccctcccaagacccgcagatgcgcctgaagctgttctccatcctgtccaccgtgctgctcagagccacggacaccatcaactcccaggggtaggtccgggctctgcctctgcacggcccccagctggggcctgggccaggggtccccatctccctccccaacagctcactgagcaagggggttcccacctccttccccaacactgcactgcgcaaggggttccccatctccctcccccacactgagtcaaaggtgggccgggggtccccacctccctcccccacgccgagtctaaggtgggccgggggtccccacctccctcccccacagcactctgggtgagggttccccacaccaagtctgaggtgggcgtgtgcagtgacccctgagcttaactggcctggaagcagctagtccatcctcactgggtaaacacaagctctcggcagggaatgcacagagaagcactaagtcaaagtcatctccgtgtggtcattaaaattccagtgaatgaaaaagttttagggaacattaactgttaatggcttatgtattagctgttctctgttttaaaagcctttgggcacttttcaaacctaacaaacaactgattgaatttctattgatggtcaaagtggtaaaaatacctctttgttatctaagacaacttttaggtggcattaagaccccgagggtctagggcctccaggtgtacggctttgaagtaagggcaagaagcatgggtgccctctaggagcactgggagggacagtggaggaagaggccccgcccgggtgccactgctgaggcagctcttagggccctgccacttactttgctcagagcaaaaggtgccgtcagctgggtcctacccccgcctgtgcggctggatctgggctgcgtcagcaccgggacccgccccagcagcacatctgtcaaagcggaaagcagttcacacaccagagcctcatgtggaaagagtccaggcgctcagacttttctccttcatgaccctcatctctgctctcgggcctcagcccgcctgtcgtactgcaggaaattttgtttcctgcttgtcttcaaagacttcagggcttagaacggaccatagaaagatatgaaccgagagccgtggcagctgtccagcttgcaggctgatatttgtgtagatgccatgcagataacacagcagggtccaggcccttccctctggaactcacactcggctgtattttgggaggaaccgctgggcaggttctgcccaggaacagttaactctgcagagcacagtttccacatctgggctgagttcccaaagaaagtgcgcctaacaacgtcttgtggaaggcggttggcgtcaagagaagtaaagtgttcagatggcagtgattttaatgaacttactagctattttaataggaaagatttttttttttatccgtttggtttttatttttagaatcatgaaatagcaagttggctctgctgaagtagaaatggtgggcggggagtcgccactgaccatcgtctgcgcagagcaccttcctgctgaccgcagctgtgagcgccggctgtacgcaggtccctgctgtgcgggtgcccaagagggctgagggctgcgtctgccatggtgtctccaccttggacaccatgaatcatgagaggttctcagggctgcctcccacaggctttctgtgtcttacctgggacactcgggactagttgtgtttaggttttcttaaaattctgtagtaattgcattgtagagcatccctaatccgaacttcagaaatccaaaatgctccagtgagtatttcatttgagcatcatgtcagtgctcagatatggtcagaccctggagcactttgcattctgaagtgaaggatgctcagcctgcgtctgacagaagctccagagaagtggctgcgagttcagggcaagaggctcctggctttgaggctgcaccgtttctggaagtcaagccccacagtggacctcgagtccctctgtgaataggaatgtgctcgggcagggaacccggagcaccagccgctgggcccctcgttccccggctctgcagcgtcttcgggtcctgtgggtctggctgtgcccagccctgctgcccgtggactatagtgtcttggggtcctgcaggcctggctgtacccggccccagtgcatggtggcaagtgcctgtgatcccagctactcaggaggctgaggcaggagaatcacttgaacctgggaggcagaggttgcagtgagcggagattgcgccatttcactccagcctgggcagcaagagcgagactttgtctcaaaaaaaaggaacgtgcctcattcagtggttcgatggtggttctgatcaatgcccagaagttctgatggagcttctgtcagacacaggctgagtatccttcaccccaaaattaaaaaaaaaaaaaaaaaaatttaaaaaaacctaagcactcctaggtggcgcccgtgtggcacgcctggcccacacttggaccccacaccctgaaggccaggacttccaggccatttcatgtggtgaccatggagcaggcgctgggttcgttcattccagagagccctcttgcaagtcacggtgccgaaaatggcagctctgcttaaaaacgaacccacgccagaaacctcgcggaatgcgtgtaaatcacaccacaccaacgtcactttccacatctgctcatctacctggctggtcccaacatggcccctgccaggagcaagccggtggcgcctccagaagaggaagggacgctgtgcaggcttcacggacgctggagggctgcgggctgtggagctggtcttggagaccagagccacctttgaaacataccgtggtgttgggatgtcactaatgagtgtgtcattttgctttgagtttgtcttggtggcactttgacctgactggtcaccatcaggacgaagtcgccgacagggtgggaactgcccgtctctctgagctgtggcccttgggtccccggaccgcgcctgtggccctcccatcccgcctctgtgaagccgcagcgactgtccttgctggacagagggttctgtggctggagagacttggcctttttctgggggagggatgcagatgggaaaggggctcactgggtgctgccgacaccaccgcacctgccctagcccaggcgtcactcaggcctccttttgaagctaggagcggcgaggggctgaaagtgcaccctcggcccagggcctctggctcgcctctggagaacaggacctacgcgggccgcaggagaggccaggggcacaggcacccctgtctccccggtagggttgggcctggaggaacctcccaattcgcactgagaagcagctcctgagaggaggaggggcctcgtgttttggggtcgagttcgttttcctgtttggctcccccctcagccccattcatccctagtctgaaacgtttcttccgagcacctgtccggtctcctcatccaccctctccgttccggttccaggcagtttcccagctacctcgagacggtgacaaaggacatcctggcccccaatctgcagtggcatgcggggaggacagccgcggccatccgcacggctgccgtgtcctgcctctgggcgctcaccagcagcgaggtcctgtcggcagagcaggtacggggctccctgcgtgctcggtggacaccggccggggactgcgcaggcttcctggcgcccggcagagctcccgcagcaggaacttgggcaggcagcagctgcacctccacctggggcccgtaccccaagaggctctccccacactggcggcggaagggcaggagccggcggccgggctgcggttcagacagcaggcgggagagcgggagccaggccgcgggcccagccagcccggtcgtgctgcgggttttgcagccgctcatgagcgtgcggtttctcggtttccggcccaatgctggctgcaagaccaggagtcgaatcccaggatccaggccagaggacgggcctgggctttccgcatcgtttctatgaacacctccggctggtaccaggtgtcagaaaacagacactgatgcccgcccgcgtcctggtcgccgcccggcgggaaggcgctgccctgggcgcccgtgcagcatcagcgccacctcctggtgcacgcggggtggtgcggtcggtgctccagccgaaagccccacgtccttggggcccaggcgagccattaccctggtttagggttagtgcctcacctaggagttgtgaacagtgtgcgtattttctaaaaatcaagtaagcaagttaaaaattgctcaaaatctaaattttacaatgaagattcaagcctactttttaggtaaagctttcaagccccctaagtccttccaggcaggagtgcacggatggtgagcacccccaccccaccccaggacagatgtgagtcacgtcgtatgtgtttgctgattgcagatacgggacgtgcaggaaacactgatgccccaggtcctgaccaccctggaggaggattcgaagatgacgcgactgatctcatgccgtattatcaacacgttcttaaaaacctcgggcggcatgacggatccagagaaactcatcaggatttatcctggtaggacatttctgttgttcacagcctgtgtatatgcagtcagccctccgtgtccctgggttccgtttgcatccatggagtcacccaaactcagatcaaaactatctcgggctgggtgtggtggttcacacctttaattccagcactttaggcaggagggttgcttgagcccaggaatttgagaccagcctgggcaacatagccataccccgatctcaacaaaaaatttaaaaattagccagggctggtggcacacacctgtagtcccagctactcaggaagctgaggcaggaggatcgcttgagcccagcctgggcaacagaccaaaaccttgtctttaaaagtaggggtgtgtgtgtgtgtgtgtgtgtgtgtgtatggctacatatatacatgtttgtgcatttatacatacaaatacaaatttgtacttacatttgcatatataaatatgtatgtattggggggcagaattccacagttccaaaaagcaaagcttgaatttgttgggcaccaagtacaacgttgaacccgcatgaagaaagcatcatgtacacattgcattcggccttaaaacaacattggaccctcgtgaaggaagcgtcgtgtggacgttgcgttctgccttaaaacaacgttgaacccacgtgaaggaagcgtcgtgtggatgttacatttagcgttaaacgtaatctagagacagtttaaggtgtgccggaagatgtgtgtgggtcatgtgcaaatactatgcctttttttatcagagacttgagcatttgaggattttggtatcctagaggaggaggattcctggaaccaaaccccacagataccaagggacgactgtatttaagtttgatggtggcttgttttatagaaaaaaagcagaaaacgtggccgggcacggtggctcacgcctgtaatcccagcactttgggaggctgaggcaggtggatcacaaagtcaagagatagaaaccatcctggccaaaatggtgaccctgtctctactaaaaataaaaaaattagctggacatggtggtgcgcgcctgtagttccagctactcaggaggctgaggcaagagaatcgcttcaactcaggaggtggaggttgcagtgagccaagatcgcaccattgcactccagcctgggtgacagagccagactccatctcaaaaaaaaaagaaaatagaaaatgctcatctttgacttctgttcaagttggtactatgagaacaaacagcaatgacagatgaaataccacaaattaaacggcacagcaagaagcaaggcagaggtctccaaaccagcactgggtgggggtgacaaggctcagcttccacgcggccgggaagggggacctcagggtggggcggctggagctgcctgtggggagacggggccgggccaccctgcagcaggaccaggggcacagcctcagtgtcgccgcctcctggagcccaaaccccagaccaaccccaggtgagagcaagcactggggaggggaatggggtggttggcttgaagcccccgaaaagcagcagcactgaacagagtcatgaattcagagagcccctcactcagggcagcctgcacacaaacccctcaggacagggcccccgccacccaggccatgggccagtacctgtccgggtcctgttaggaaccagactgcacagcaggaggtgagaggtgggcaagcgaaacttcatctgtgtttacggctgctccccatcttttgcattaccacctgagctctgcctcctgtcagatcggcaacggcattagattctcataggagcacaaatcctattgtgaactgtgcacgcgagggatccaagctgacgctccttatgaaactaatgcctgatgatccgtcactgtctcccatcgtccccacatgggaccgtctagttgcaggaaaacaagctcaggcccccactgattctacaggatgatgagttgtagaattatctcattatatgttacaatgtagtcatagaaataacgtgtacaataaacgtaacgcacgtgactcatcctgaaaccatctcaccccctggtccatggaaaattgtcttccatgaaaccagcccctggtgccaaaaaggttggggactgctacctcagaacaccgaagacccggcgctaagggcagcctcgcacccagcccgggaaggaagtgccgataatagaaccacctcaaagttacctttattgaggcgtgtttaagatcctcaaaaagctaaaagaacaacatccactaaaaaacaagttgagaaacaagaagacaagcaggaataaagaacagatggaaacggaagcgatcgctgggaagtccggagtgacacggaatggtgtgctggcactactttgaggaaaggagttacccagcgagggagaaaggggatggggtgggcgggaagcggccactcaggcgttcctgattagctctacttaatgtgattatctatattttgtgtatttatgccagaaatgtttagcagtttttaaaagatggttcttgctaattcccggaaatgaatggagtcatcggaacttcacactctgtgtactgggtcaactctagactgaatgtggctgaaaacaaagttagtgacgtgaaagccaggaatgtggaattcctcaagatcacgagacagagaggggtgcaaggcctggagtgggcgaaggacacgggacggggagggacgcggggcctggagcgggcagaggacacgggatggagagaggtgccgagtgggccgagaggctcccgggcttttctgaatcccaggagaagagaatggaggagagatggtgcctcagaatcttccagaactggagacagacatgaattttcagattcacagtacacacggcgctgggcagaaaaaccgccgcctgctgaactctgaggtccgggggcctttgtcactcattctctcacctttgcttttctgtttttattctttagtaacaaacatcctgttcccactgactctggaacaagttcagtccatgcgattgttgggaattcactcactttttaaaacaggagctggcggaaaggctgcacgcgtttgggcatctgagcgcatttgggcatctgggccacggccccctgtttattttcactacaaaaggttccttgagaggccccttgcctattagtgccagctctgggcttcccagggtgaagtgttggatgaatcatggcctccttggtggggaaggaaggatgtcctgagttgggagcacagacatccaggcctcccaggacagacagacacaaacatgaacagcagacaggccagcgtgagccgattctgcctggcttagtcgtgcatgaaaggaaccctaaactggtacaaaagtggacctgcaggccatccagggagtgaccatcgtaaaaacacaatagccagtgccactctgtgtacttccatagtcgaccgcgccagcaggaggcctcggaggatcctgtccgggcccatagatgtttgctagcgggacaagcttgggtgagttgagcatctgactccgtccttcctcctgagacacgtgcagcgagggcacccactgtgcagcgagggctcccgccgtgcagtgagcataccccctgtgcagtgagggcacctgccgtgcagtgagcataccccccatgcagcaaaagcaccccccatgcagcgagggctcccgctgtgcagtgagcatacccgctgtgcagtgagggcacctgccgtgcagggctgcttcagggtttggcaccataatgcctggatgtgctccgtggcttcctccttggtgcctgtgtttggtggctggaaggcccagcaccctcagggcccagaaccctcagggaagtgcctgggcatctgccaggaattaacccactgggtcccacttgtctcaaagcctggcttggtaggatggcctgaactttggatgtttttcatgcctttcgttacataggatcctcttgctgagggtggatcatgccctccacattgcaaaagcatcagagacccagcccaccctcgcgtctgcagcgggaagatgggcctggtgccaggcgcgggcagccgcccctcccagcgtcgggaagatgggcctcatgccaggcatgggcagctgcccctcccagcgtcgggaagatgggcctccgggtggttttgcgactcagtcatctgcgaatttccggatgctgcacagaagggggtgccaaagtttttttaagatgatgtaaaaaaagcataaatttgataaaaattatgtccattaacctcataagtttctacccatcgggaaggatcatccttctgttttcagcagcagaaaactgaccacagtagggggttgtctgtcactgagtcctcagctctggtgggagggcagggtcagagctgggcagggtggccagctcggggatctgagcatctgggagcaggaggtggagggccaggtgagcacacagctgcgaggaggtggaggaccaggtgagcacacagctacagctacagggaggctctgcgcctgcaggacaggttattacaggggccgcagcagggcctgggccgcctccactctgttggctggggttcaggggtcccaggtcgccaggagcaccttgcatgtggctcgggatgcacggagtctcccgtgaggtgtgggtttcttaggaccccagggcaggtgtcccatgggagtatgaactaaatgcctttgtggacgtttagacgtgaaatgtctgctctagactcacacacctgtctcgctccctccttccagaactcttaaaacgcctagatgacgtgtccaacgatgtgaggatggcagccgcctccaccttggtcacctggctgcagtgtgtcaagggtgccaacgcaaaatcctactatcagagcagtgtccagtacctgtaccgagagttgctggttcaccttgacgatccagagagggccatccaggatgcaattttaggtgagactccgacggcttggccttcgttccgatgcctgctttcggcgcctgccacgggcatctgtagctgagccgtgtgaccggccacagggccctggggcacaggaggggcctcagctccggcctggcacactcttgagttcttggcaaaccctgagagcggctgtctttgtggtgatagctgctgacatttcctctaacagaaatcaaaactgagagtattctagaatacttgttagttgtttaaaataacaatagtaagcccagtatatattgacacagatggcttgtgtttttgaaaaatactttccaaaacaaaatcatctgcaagaacgatttttgcaaatgtcttaaatgtgtagcttgatggaagacactggactttcacatcttccatacagtcagtcatgatgtgtatggctctggctgaaatacgtggaaaataatctggcctcgcctgtggcttcaagtgtagttggacaaaagaagagtattttagtagccttttcagataggcgtgggacttcttcaataccacgccaacagcgacacaggccgtcccttgaaggtcactcacagcacagggcctgaggccacacaccacagagccttccacgctcagtgcattaaaatccgctggtccatctcacacttggaatgtaacgatttgcttttttttttcttttttttttttttgttttgttttgttgttggtgaatataatgacgttgttcttttttttaataaaatttgtatttttaatttttgtgggtacacataggtgtatataaggcatgtgtgatactgtgatacaggcatgcagtgtgtgtaaatcacattggggaaatggggtccccgtcacttcaaacacttacactttctttgtgttacaaataattcagtgatacttttcgttatgtttaaatgtgtgataaattattgttgaccatagtcaccctgttgtgctatcaaatactaaatcttactcattctgtttttgtactcattaaccatccccacctcttcccccggccccattcctcttccgagcctctgggagccatccttctgctctatctccatgagttgaattatttttatttttagttcccacaaatgagaatgtgcggaatttgcccttctgtgcctgacttatttcacttaacatagcgacctccacttccctccatgttgatccaatgactggatctcatttcttttgtggccggataatattccactgcgtgcgctccacgttttccttctcccttcatctgtccgtggacaccccggttgcttccacaccttggctgtcggaacagtggggcattcggcgtgcgcgtgcagctctcccccatagctgaattcctctcttttgggtatttgcccagaagtgggattgccgggctgtatggggctctatttttagttttggagggacctccagactgttctcccagcggtgctcatttacattcccaccagcagcgtgagggttcccttgtctccacatccgcgccgggacttgtttccgcagccattttaactggggtcagaggatgtctcacttgtttctatgtgcatttctctgaggagcggtggtggtgggcaccttttcagacgcctgtttgtcatttccatgctgtcttttgagagctgtctgttcaggtcttttacccatttttaattggattattagattgtctgctattgagcctgagctcctcatatattccagtgattaatccttgtcaggcggcggttctaagatacagtctcccatcccgtacccgcgggctgtccctgcggctgtactctgctcattcttccctttgctgtgtggaagctttgggcctggatgtgctgactttgccttttgcctcctttggaaaatacttagaccttccccgcgcagctgcgtccggtttcccggcgtggctacatccggttatgcgatgtcggatcttcctggtgtggccgcctcccgtcgcgcagcgtcagaaactcggatcttcgcggcgtggccgcctcccgacacgcggcgtcagaaactcggatcttcctggcgtggccgcctcccgtcgcgcggcgtcagaaactcggatcttcgcggcgtggccacctcccgacacgcggcatcagaaactcggatcttcctggcgtggccgcctcccgtcacgcggcgtcagaaactcggctcttcgcggcgtggccgcctcccgtcacgcggcgtcagaaactcgcatcttcccggcgtggccgcctcccctcacgcggcgtcagaaactcgcatcttcctggtgtggccgcctcccgtcacgcggcgtcagaaactcggatcttcccggcgtggccgcgtcccgtcacgcggcgtcagaaactcgcatcttcctggtgtggccgcctcccgtcacgcggcgtcagaaactcggatcttcccggcgtggccgcgtcccgttacgcagcgtcagaaactcgatattcctggcgtggccgcctcccgtcacgcagcgtcagaaactcgatcttcctggcgtggccgcctcccgtcacgcagcgtcagaaactcgatcttcctggcgtggccgcctcccgtcacgcagcgtcagaaactcgatcttcctggcgtggccgcctcccgtcacgcagcgtcagaaactcggtcttcctgccatggccacctcccatccggcggcatcagaaactcggaccttcctggcgtggccgcgtcccctcacacaacgtcagaaactcgatcttcctggcgtggccacctcccctccggcggcatcagaaactcggatcgtcctggggtggctgctcttgttacgcaacgtcagaaactctcctgcgtgggcaccaggctcagaagagtccggcttgtggtggcagggccaagctttggctcattgtgattttttgtgtgagagcttgacttgtatcctcggccacaaaccctgtcggttgttctgggagtgagggacttgggccgttcactttcacgccgtgctctgccagatcccgcgtccgcacagccagggtgggtgcactgctcgtccgtccgccattcttcctgggaaaagcagctctgctgcacgaccctggtcctccgtgtgaagcggtgcacctggtgcccactcgcgggtgtaagccgtgtgcgtgagggtgagtgtggcaggtgaagccgtgtgctcgagggtgagtgtggcagggggcgtgggcctcagctgctcccgcatctgcgcaggtgtgagcacagtgacgggcaggccgggcatgctctgcgtgcgaccacatgcctggctttgactcacagaccctctgaagggtcctggggaccccgagggccttggagcccatgtcgggagcccctgccttgagtcgtggaatcaggttgtcagccagtgagggagccccagagcccattgatccacggcggggcccgtggtctctccaggtcacggaaagaagctgcgaattggagaccaattggaaattgtttaaaaggaggacagcagctcacgtgcaggcctcgctgggacagcccatcctgccagatccacgcaacgcccccagctccccacactccctggcaaatcccagccctgcctgcgccctcccagctctcctgtcctgcactacacaccatcaacccgagttctgagcttctcctactctcagcctcagcctcactcgtcctcaggaccttgctctaggccgaggagaccagtgcccctgtgcaccagctcagcctgcagccccggccctctcgcctccccaggactgcacagggcatctcccttccccactgcacggtacaggccattctttctcctgtctttaaaaaaacaaaacacagatgccctgtacgccgcccccacctcccccacctcccccaccgcacatccgcctggcagcaggctccctggaagcagcccgccttacccctcctcgaggccctgggcccatggcaggcatctgcagccgtccacctgcctgcacctctgagcagcgccaggcacagctggcggccacgcaccctcctctggctgcgggacgcccgtgctcagtctcttggtctttccctcgcccatgtgggcccctcactgctcctctgctgtgtctgcaccgctccctcagagctcttctcctggcctcagctccacacacaagtgcagctgcctggtgccgaaccctgggccgctacccccctccctgactgcctgccgggttccgccaccctcagtggctcagtggccatctgtcctcaagactgaaggcggagaccttgaggtcctcctggaccccctcttaactcccagcagaatctgatagactccccagccactgcagcaacctccccatcctcttcctgcctcagctagacacgcccaaccctttctggcccccacccctgcagctcccactgcccccatcacacacaccaccacgagcccctgacacgtttgccttcctgattttcatcatcggccactgcttcccgatgaaccctccgtaagcatgggttcatttccggctgtgtcggtgatgcctggcccgtgggaggtttgcagtcactgcggcaggtgaattggcatccgcaaattggataagaaagtcgcctgtttttctgagcctatttgctcctgtgaaacctgtttctaagcccaaaaatgccacctgaagactctgcaggacatcatttcatggtctgcccacaactgccaggaggcgattttcagttctttgaatgcacgttgtgactgccgtgcacccacccagcagcatcaggttcctcatattcacatagtgaccatgcagcatcaggtcacttgtccacgttgtgactcaggtcattcgtatccacattctgactgccgtccacccgtccagagtgtcagcttacttatatccacgttatgactactgtgcacccatccgctgcatcaggtcgctcgtgtccacactgggactgccgtgcacgtggccagcagcatcaggtcacttgtatccacattatgatcgctggacacccatccagcaggatcaggtcattcgtatccacattgtgactactgggtccccatccagcagcgtcaggtcattcgtccccagattgtgagtcgggtcactcgtatccacattgtgactactgtgtccccatccagcagcgtcaggtcattcgtccccacattgtgagtcggatcactcgtatccgcattgtgactactgtatgtccacccagcagcgtcaggttatttgcagatgcttttacagatgcttgaacttcactacaaagccaatttgcacgagaggtaagattggtttcatgtttgtttctggcatgttcaaggtgtttttctgttttacagaggtcctcaaagagggcagcgggctgttcccagatctcctggtgagggagacggaggccgtcatccacaagcaccgctcggccacctactgcgagcagctcctgcagcatgtgcaggccgtgccagccacacagtgaccacgctggtttcagccacggcacacccttgtccccacctgagccagagtttgtggcctttaaatctcataaacaaggcacctctgtgccagcagtgagactgtgacagcaagaatgtactcctcaggacacctgcccactctttccctggaataacagcctctgagtggattctgcatgttatgtgatttgttctgttcatcgagagggctcccaaacatctgcagctgatttgaaattaaaagtaagtcgcagccgctcctcccgcagccacttcagcagcatcttagattttaagcctcacgtgcgcagctggttcatgaactattggctgcatcctgcttaggtgcccaccaagaaggtttttacctacttaacaaaaaagaaagaagccaaagtgattagaaagaaatgaaatctctttttgggttctgtctactgaaatttaatatctcagtgaacagactaaaaggaatttagaatcctaacaacttatcagatttctcctgttttaaatatactgggactttaaaggttatatgtccggtcaccgtatgttttaagtcggtgttaatgctaacagtgttgaaaacaatatttcatgagatctaattgtggttgcccctataggtagcaggaaagtaaagttgcatttccctctcgcacattctacacccaagtgcctaaaagatctcattgtaagtgggtagtgttaccggaagccattgtgttcacacgggggaaatgccgtatatatttttcaacaaatattaacgtttatactttcatgtttgaaaatttaattaaaaatgtttgttttaatgattgtgtatgcctgactttgtgagttggtaactaaccgacatgtcaggcagggatcccagcctctagaattccagagttcctctgtggggtgtcgtagtgcccgctctggacaccagggggcaggagctcccaacacgttcggggaacacccctggtaaggagggccccataggactcaccttgagaggggctggggcatcagggtgagggcaggccagccttgggggggtgtcagggttgggggaggtcagccttggggggcatcatcagggtgagggcaggccagcgttgggaggggtgtcatggttggggaggtcagccttggggggtgtcagggtcgggtgaggtcagccttggggggcatcagggtgagggcaggccagccttgggggtgtctgggtagggggaggtcagcctggttggcaggtggggtgtccaggtgcagagaggtcaatctggatgggggttggtttcagagttgggggacgtcaaccttgatggagggtgttttgtctgggtgggggaaggtcacctttgggattgtctgggtgggggaggtcagccttgggggaggtcagccttgggggtggctggggtgtccaggttgtgggaggtcagcctgggggggacgccggggtggagaggtcagccttggggggtgtctgggttgagggaggtgaacctcggagggtgtcagggttgggtgaggtcagccttggggggtatctggtttgggggaggtcagccttgtggtgtctgggttgggggaggtcagccttggggggtgtctgggttgggggaggtcagccttggggggtgtctgggttgggggaggtcagccttggggggtgtctgagttgggggaggtcactcttggggggagtcagggtgggaggaggtcactcttggggggtgtctgggttaggggaggtcacccctggggggtgtcagggttgggggagttcagccttggggatggctggagtgtccggattgggaggtcagcatgtatagctgagcctgccccatggactcacatcccctgccctagacaccctcgccaccctctggtccccttcagagttgcaccgtcatggctgttccctgcgccagcttctgtaactcgtggccacagggatttcgggggccctcaggggtggtcttccacctcttccttgtgtgccctttgacctctgtggcttctgccacatccttgaagagccctcaagagcccctgggtcggtggtccttggtggcgatggagccagtggcagcagcctcacctggaagcttgttagaaaggcacattgcagggcctcaggccagacctactgaggcagagacaggtgggccgcagtcagccctgcaggtgattctgaggctgcggactgggaggacccccacctgtgcaccaagcagttcccatccagctcccatccagcacgaggctccgtcgtctgtctctgtcacaagacccagaaatgaatggcagggagcttgc

SEQ ID NO: 162 - DNA, 83423 bp, Homo sapiens
  source 1..83423: mol_type = genomic DNA
ttacttgaatatctcccaggcttaaacgatcacgaattcataagcgttgttagttcagaaggtggctgagcaggcccccggaattcagtgtcagcatgccacaggatctgaagttcaggaaaggtgtaacaaaaagggatttttcttttttcttgagacagagtttcgctcttgttgcccaggctggagtgcaatggtgtgatctccgctcactgcaacctcctcctcctgggttcaagcgattattctgcctcagcctctgcagtagatgggattacaggcatgcaccaccacacctggctaattttttttgcatttttagtagagacggggtttctccatgtgtcaggctggtctcgaactcccaacctcaggtgatccgcccgccttggcctcccaaagtgttgggattacaggcgtgagccaccgcacccagttgagatttttatttcttaaaggaaaggataaggtgggccaggactaagacaacacagtagcaaacatctggctgaatgctggagaggaagacagtgggagatccaggccaggctccatggacgaactgcttgttggctccttaggctttgggtctgcgggaccctttcgctactgggaatgggagcctgtctgactgcactgggtctgagactccctgctcctgctggtcaccatctacacgcatgtggtgttggtctccagggttagaaccagaacccctgaggacgcgggaaaggctaggaagcctggggatgacctaaagtccagctatcaaaatgcgccgcgttttcagaaaaactactgccacgatttaacctaaaaagcttcatctgtattttctgccacagtttgcttccgtttccttcagtcactattccctggcgaagtctccacgcgctcccgttcgccggggaacttagggtatccgggcttccctaaattgacaagcgggggccggcgccttcgcccgccttcgctggccgccgcttggtttgttcttcttctccttcggggacttctccgcccgcgcccgcgcccgcgccccagctttcgtcccgctgtgcggagatgccacccagctccaccgcaggaccgcggagcgagaggcggcagacgcgctccgggggccgccggtcaagaggaagatgaagggcgcgacgacttcgcggtttccagaatgggctccttctggcccaacaataagtgccatttggaatcttctcggccttctctgtgccttccgcgcgtctgggctccccggtaccgtagacccggccccgagctccgccccctcgccctgggcttccccgccccctcgcccccagtctcctgggctcttcggggcggcggaagagccgagaaccttcgcgaaggtggggcgggcgcccccgaggttgggcccgcggtatgggcagtggaaactgcgcatgcgcggcgtcagggtcgggcggaagttgacgccgccgtgccgccgccgcgtgacgcatttcctgtttgttgttggagaaaggagagaaaggaaagcgcgaggagccgccgccaccaccagcgcagcagtcctggagctgtgaggagattcgggccgtcaccctgcctcccctgcgtcccgccaccggccgcttctgtcctcggtgagggtctgttccgagggtcgggggaggtcgcctagggccccgcgcgcgcccggcagacggcggacctcacccggcgcctggcaacagcgcggggggtgaccggggtcgccggccggggaaaggactggacggggcgggggccgtggccggggttgcggggcgaagggtgggcggggtcctctgggtcaggtctggggccggggccggggctggggtctggggccgcccggccgcgtcctccccgcccggcgtccttgccggaacgcggcccagcctccgcggcggcggttgggggtggggcccggcctgggagcggccggctggggctcggctggggctcggcggggccggcagcgtgggaggcgtggagcgccttctttttctaaggctcccgcactcgcgtctgaaaccagaaacgggagtggcttgcggagcaggaatgccgcagccgtgccgccaagttcggagggagaagaagcaggtgggggaccgcaaagccctgtttctagaactccggacggattgttcagaagtttgtggaagagcaggctgcctttctcactcagaatgtttgtctgctttgctttgcgttaaagaatctgcaccgtagttgatgcaactgaagtttatataagaagtttacattaactcttacctaaggaaggtcagtgacacacgcagtgtaaactgcaaatcatatattggctcgagaaaggttttggcactagcgaattttttaaaggatgggtttgctagtcagacgtaaacttctgtgctaacttctcacgtaaacggggcaggaaacagcgcaagtagaacgatcgtgccaccaccgaaggggtgccgcctgcgagctcggaggcttcagcctgtttgggaagagtaggctgagcggcgctctttgtagttttcaacgtttttattgagttgcgaattttagtaaggatttgtcgctacaatttaagccaaattattgatttagtagaaaagttagagtgaagaccgaagaaaggaaacagacgttaaccattaaagcttgattgctgctgcttcgtgtttaaccgcacttttccaaatagtgttgcgtatcagaacgattcatgatttctgaaaggaattatatgcagccgccttactcctccgccagtccacccgtcccgcgttctctctgggtttactccagacttcctttttttttttttcctgagacggagtctgttctgttgcccaggccagagtgcagtggcgcgatctccactcactgcaacttccagctcccaggttcaagcgagtctcctgcctcagcctcctgagtagctggggttacgggtgctcgccaccatgtccgactaatttttgtatttttagtagagacgggggtttcaccgtgttggtcaggctggtctcgaacttatgacctaaagtgatcgcctgcctcggcctcccaaagtgttgggattagaggcgcgagccaccgcgcctcgccgactccagacttgtttccactcctgagggccttaagctcccttggagtttgtgctttcacatttctttctgccttccgtgataaagggatgaatagtttttatgcacgcttcagcgagctgcgggtttttgtggattacgcaggctgtgaaatttgggaagtaagttgccttaagttggtagatgtggagatttgacaggaagtgggagaacaaaggggttgggaagcttttggaaagtgtccaggcttcatctgtgctgtggaaggtgagaaagttgggaattccagagggcagagctcttaaagaatttgagatgagttcagcactctcttcaaaacagtgttttaaaatttattttcttctggatatgaaagtgttaggtttgggaagtaattctggctgtaggacagtttttccggaacactaggtggggagtgttgaatgttgtgaagactaaaatatgcatatggtattacagtgtgatacctgttactgagtggcgtacattagctttcatttttaagcaagcccgtaattcccttctattaactctgttttggacagtggtacccgtcaccctcatcagtcttcaacctagataacctaaatccaggtctgaggtgggggtggaatggtctgtttgcaccttttttttttttttttttttttttttttttgagacggagtcttgctctgtcgcccaggccgtaattaatgcggtggcgcgatctcggctcactgcaagctccacctcccggggtcacaccattctcctgcctcagcctcccgagtagctgggacttcaagcttccgccaccacagccggctaatttttttgtatttttttagtagagacggggtttcaccgtgttagccaggatggtcttgatctcctgacctcgtgatccgcctcctcggcctcccaaagtgctgggattacaggcatgagccaccgcgcccggccttttgtgtgtgtgtgtgtgtgtgtgtgtgtgtgtgtgtgtgtgtgtgtgagatggagtttagctcttgcccctgctggagtataatggcaccatcttggctcactgcaacttcgcctcccaggttcaagcgattctcctgcctcagcctcccgagtagctgggattacaggcatgcgccaccacgcccagctaattttttctatttttattagagacgaggtttcactatgttgttcaggctggtctcgaactcctgacctcaggtgatccacccgcctcggcttcgcaaagtgctggattacaggtgtgagcccgcgcgtccggctgtcactttaaagagtattataagagggcacttcataacttgggcaggtatttttagtcatcctgaacgtgtcgctgtggactgggtgtcaccgcgggaccgcacagacaccttactgtcgtctgctgtaaaggtcagcttctatattggttaatgcttacagatatctgttgaggaataagagaatgtaattagcctttgtatttgtgagttgacgttttgacgggatttttacttcttagtatttatttgcatcgaggttacacactggattaacagcgttttttggaaacctttttaaaactttttcatttcctcagaaatgattctgttcaaaatgtggtttggttaaatttgtgcaggaccccacctggtggtgagaggcgggtaactgcaggctcattagcgagtaagagtaggatcagtggcaggatttagcaaatggtgtagttcaaggatgaatagaatttgagaatatcaaactcaaaaaaatgaggttaatgagaagaagagcaaagttggtgaaaacaagaatatgttagaaacgatgatgtaggaatggaaaaacgacaacgcctacctgcagaaaagtcaactagtaaaaatgtgatttttttttttgtattgatattaatgaggtgttttgtcaaacaaaaccctttatgtttttgtatggacataaatcactgttgacctgtttcatgttcctggagatatcctacttgagaaggaatattgattgatgattagttgactgactgatttacttgagatggagtccttgctctgtgtcccaggctggagtgcagtggcgcggtcttggctcactgcactcctgggttcaagccattctcctgcttcagcctgccaggtagctgggatgacaggcgcgtgtcaccacgcctggctaatttttgtatttttagtagagacggtttcaccatgttggtcaggctggtctcgaacacctgacctcaggtgatcccctgcctccgcctcccaaagtgctgggattacaggcgtgacccaccgcacctggctgtgtgtgtgtgtgtgtgtgtgtgtgtgtgtgtgcgcgcgcgcaggtggaatcaccctgtgtgcccaggctggtctcgaactcctggcctcaagtgagtctttcatcccggcctgtcaaagtgctagaattacaagtgtgagccaggtgcctggccagattttagatttttttgttgttgttgagatggaatctcatattgcccaggctggatgcagtggcgccatctcggctcactgcaacctctgccgcacgggttcaagcgattctcctgcctcagcctcccgagtagctgtgattacaggcacctgccactgctcccgactgatttttgtatttttagtagagacgggggtttcaccatcttggccaggctggtcttgaactcttgacctcgtgatccacccgcctcggcctcccaaagtggtgggatcacaggtgtgagccactgcgccaggccatattttagaattcttaagctgtgttgcaaaattacgtgtctttggaagggtgatttagtttacactacatatgatttttccccctttgatatttttctacttaccttttgccaccaaaggcttaaattaaaagtgtgttttatatttgtgttgtgcatatatacgtgtgtgctctagttggtatgcttatgaactgtgtactaatacttattcctctctgccaccttgagatggcatgtaccacttgggtgggctttgaatctgaagttatttgtgtttataggaatgtccaggacacagagtgcttagaaagtattgattgaattagattctttctagtttgtgtatgtcctgatgaccttcctgtgattaataatggaatccagaattcaagaaagttggaaaaaataagtttcagcagcactggagactgagtacttaaccgagtgttgctttgtttattttagagtctcacactgtcacccaggctggagtgcagtgtcgcgatcttggctcaccgcaacctccacctctggggttcaagcgattctcctgcctcagcctccctggtagctgagattacaggcgttcgccactacacctggctaattgttgtatatttagtagagagtgggttttgccatgttggccagactggtttggaagcaggtgatccacctgctttggcctcccaaagtgctgggattacaggtgtgaagcaccgagcctggccctattttattataataataattttttttgagacagggtctcactctgtcacccagactggagtgcagtggcgtgatctcagctcaccccagcctccgcctcctagtgtcaagtgattctcctacctcaggctccggagtagctgggattacaggcacgtgccactatcctggctaatttttttttttttttttttttttttttgagtttcactcttgttgcccaggctggagtgcagtggtgcaatctcagctcactgcaacctctgcctcccaggttcaagcgattctcctgcctcagcctcccgagtacatgggattacaggcatgcaccacgacacccagctaattttgtatttttagtagagacagggttttgccctgtccaactcctgacctcaggtcatccgcctgccttggcctcccaaagtgttgggattacaggcgtgagccagcgtgctggcctaacttctatatttttagtagagatagggtttcaccatgttggccaggctggtcttgaacttgtgacctcaatccaccttcctcgaccttccaaagtgctgggattacaggtgtgagccaccaagcctggcctattatgattttttaatgaaagggagttaagcttggaagtatctaataggtgatgagtgctagttgaagaaatggtctctgatcttgagtaatggggaaataacttctgtgtttgtttcagaaatattttaggacatactggataatgaaataagtaggtgatgtgtgtgataaggaatgaaaattcactgctgtgggtttttttttttcctacctgtctgtactttttttgtttttgctttttttttttgttgtttgagaccaagtctcactctgtcacttaggctggagtgcagcggcgtgatcttggctcactgcaacctttgcctcccaggctcaagcaattcttgtgcttcagccttctttctgagtagctgggattacagatgtgcaccaccacacccaggtaattttttttttttttttaagacagagtcttgctctgttgctcaggcaggagtgcagtggcactatcttggctcactgcgcctgcacctcccaggttcaagcaattctcctgcctcaggctgccgagtagctgggactacaggcgctcaccaccatgcctggctaatttttgtatttttagtagagaaaggggtttgccatgttggccgggctggtcttgaacacctcaggtgatctgcgtgcctcggccctccaaagtgctgggattacaggcgtgagccacctcacctggcctcagatgaatttagaaaccactatttttttttgagatggagtcttgctctgttgccccggctggagtgctgtggtgtgatctcagctcactgcaaactctcccgggttcaagcagttctcctgcctcacctggaactacaggcgccaccacgtctgactgggttttgtatttttagtagagacggggtttcaccacgttggccatgctgttctcaaactcctgaccccaggtgatccacctgccatggcctcccaaagtgctgggattatacgcatgagctacccacgcctaatctttatgtgacgtgtttttttaaaagtcctaaacttagaggtcattgaatttattggagaaggttatttttgattaatggcgattaggctaatttttttcatggttttaatagagatttttcgtttttttaaacttgatttagatgtattgcttttggaaattgcagaaattaacaaaccgagttttcctaagaaatattttttcttaatttcttaattgaaaagttttctatggcttccttaatagacagtaggacctagttaatagtttaaagaagtttcataattgttattagaaatgttaattatgggccgggtgtggtggctcacacctgtaatcccagtactttgggaggccaaggtggtcagatcacaaggtcaggagtttgagaccatcctggctagcatggtgaaaccccatctctactaaaacaatacaaaaatcagctgggcgtggtgacaggtgcctgtagtctcagctacttagcaggctgaggcaggagaatggcgtgaacgcgggaggcggagcttgcagtgagccgagatccctctactgcactctactgcactctgcctgggtgacagagtgagactccgtctcaaaaaaaaaaaaaaatagccaggcattgtgggacacacctgtagtcccaggtactcgggaggctgatgcaggagaatcgctggaaccagggaggtggaggttgcagtgagctgagattgtgctgctgcactccagcctgggcaacagagtgagactcaaactcaaaaaaaaaaaaaagttaattttgtagttagagaatatcttcctgctctacgcaaattcccttccagcctgaaattatttgtttttttattttttatttaaaaaaaaatttattatttttgtgacagggtcttgctccgttacgtaggctggagggcattggtgcgttcacgtctcactagcatcgactgcctgggctcaagtgattttcctgcctcagccacttccagtagctgggactacaggtgcacactgccacaccctactgagtttttatatttcgtagagacaagattttgctgtgttactcagcgtggtcttgaactcctgagctgaagtgatccccctgcctcagcctgccaaagtgttaggattacaggcatgagctactgtacccagctgtgatttcttttaaagtgctactttacagcactgtcacttttattttatcatttttaactttaaagttttttgtttatttttatttattttattttttgagatgaagtttcgcccttgttgcccaggctagagtgcaatggagtggtctcggctcactgcaacctctgccttccaggttcaagtgattctcctgcctcagcctcccaagtaactgggattacaggcgcccgccaccacacctggctagtttttgtattttttgtagagacaggatttcaccatgttgtccagactggtcttgaattcctgacctcaggtgatccacccgcctcagcctcccaaagtgctgggattacaggcgtgagccactgcgcctggcttaaaatttttattttttatatattttgtttttttctgagacagggccttgccctgtctcttgtccaagttggagtgcagtgacatgacatggctcacagcatccttgatctcttgcgctcaagtgatcctgccatttcagcctcctgcatagctgggagtacaggcatgtgccaccccactcagctaattttttttatctttttgtagagatggtgtcttactgtgttgcccaggctggtctcaagctcttgggctcaagtgatccttctgcacatttccaaggttgtttcactcctgtgtctttgctgtctagaagcttttcagtgtgatgtaatcccacttgtctgtttcggcttttgttccttgtgcttttgggggtcatatccaaacaaagattgctgaggggccaaattttaaattgtgtataattttaatgacttcagatttaaatagctgcatttggcttatggagtcttttgagcagcatggttttaaaaaggtttttgccaagtggggttctaatggacacctatgcttgtagagctctgatgtgagtgatctgctgtagaaattacttcttttgatttagtatattattttaaaatgcaggtgatgcactggtttcttggtgagggaagctggtttttcctggctgagcttctgtagggtggagggctggagtccaggctctcgctgggcagggaaggcagcttgagtgtgccttccagtcctcctgagggcccacatttttctgggatcacctgttttctgtaatgtgcattgaacacacgggccaggagaagagggaagtagaggagctttgtcctctgtgctcatcctcacagtgctgggcgggccagaaggattcagggccaaccttagggagatgaaggccagttaaaatgttttattgccacaaatggtgtcttttaagaaatgaatccatgtattttacacttaaatgatattaggctactccgggcacactgcctatggggtagccctgctctgcaaggagtagtaaaaaaaaaaaaaaaaaaaaagttaaagatacaacttagtttctctgtgactagggaaatcgtccaagtatgtatcaaataatgctaattggtacctagttttatatcttgattaggcaactttttgcttaaaattgttttggaatgcattagtatttctacagcttcaggctgctttatcatctaatacacagttggatatttaatatatagttttatcagttttttttaaacactgtttttgagaggtctgaggaaaaaaaagatagtgttaccaaaaatacttctatagggaaatactgatagaaatgtataggtagccttgaaattctgaggttaataaaaaaatttgaatgcaggtaacctttcatggagtttgtcaaattttaaattgtgtcttacatcagtgatgactgaagcagtaaggagtgagcttgcagcaaacagtggggattgttgcagcatcagcacttcagccagctctgcaggtttccttggagacacgtggatttctctttctagaccttcagctattttcttttttttcttgttttcttgagatggagtcttgctctgtcgcccaggctgcagtgcagtggtgcgatctcggcgcactgcaagctccacctctcgggttcacaccgttctcctgcctcagcctgccaagtagctgagactacaggcgcccgccaccacgcccggctaattttttctatttttagtagagacggggtttcaccgtgttagctaggatggtcttgatctcctgacctcgtgattcgcctgcctcggcctcccaaagtgctgggattacaggcatgagccaccgcgcccggccagctattttcattttgttgtttctgtaatgcgtatttgtatttaatttatattctaaatttgttagtcttactggcatttgatgaaaactaaaaaggtaattttgagatttcaagtactggtgagagaatgtcccatagccttgagggttggaattgtgtacattgacagcatagtgccacgatacaggctagcatgagttctggaggcaaacttggattcttactatttttaaagatgcagtgtctttggtatgttgcccaggttgaactcagactcctgggctgaagccatcctcctgcctcagccttctgagtcactgggactttaggtgcacgtgactgtgctcggctcagacttgggttttgaacttgctggaacattgacatttacttaattcctttgagcccccgtttcctcacctacaaacagtaactcacagaatgactgtgatggaatacgtacctgtaagaatgtgtgacacgtgagtcagtaacacattgttgccccagctcctttcccccttaatcggctaataattaagcctcaattattagtaaactaattaagcatcatatgacttgatgattagcatgtcacgtttaaaattacctgttgtcattcaggttataagaagtttgtttatttatttgtttttttgagttggagtctcgctctgtcaccctggctggagtgcagtggtgtgatcttggtttactccaacctctgcctcccgggctcaagcgattcttctgcctcagcctcccgagtagctgggattacaggtgcacaccaccatgcctagctaatttttgtatttttagtagagatggtgttacgtcatgttggtcaggctggtcttgaactcttgacctcaggtgatccacctacctcagcctcccaaagtgctgggattacaggcgtgagccaccatgcctggccttattttatttttttgagatggagtcttgctctgtggctcaggctggagtgcagtagcgtgatcttggctcactgtgacctctgcctcccgggttcaagcgattctcctgcctcagcctcctgagtagctgggattacaggcgcccaccaccttgcccagctaattttttgtatttttagtagagatggggtttcgccatgttggccaggctggtcttgaactcctgacctcaagtgatccacccgtcttggcctcccaaagtgctggaattacaggcatgagccactgcgcccagtcttattttttaatattgccatattttaaataggaatggaagatttctgcaccagtcctagcgtttgtggatgtgcatggaaccctgttggtgaagttttcttgccttggagaaggaccctaaacagtttcctaaatagctctcctgtctgcgcttggttgcattcctgtcgtttttgattcccgcacatatcgtttggagcatcttcgtaaccctgccgtccagtcatcactctcttaagtccatctcccttgtagttagaagttatctttccacatactcctgttgagttcacaccaccgcttaactcttctacttacagtggaagagtcctaattccttagttgtaaaattcttcagttgcgccctgttctttcttgtcctgactccctcccctccctcttactcccagcaccctcacactgacgttccaccctactaacttgctgcgtcccacatgggctgtgtgctgtcgttattttgcctgagcatacgctgttacttgtgtgtggaatacttttgcctctgttctctgcctggggagcttactcttgtttttcatttcgtcagtaaaatgtcagtgttaatttttcctttcctcatggtctctataccatctccccagcactctgtgcatatttgtctttttaaatttttttttattttttgtgtagatgagggcttgctgtgttgttgctcacgcttatctggaattcctgggctgaagcagtcttccagcctcggcctcccagtagtgctgggattacaggtgtgagaccctgcaacggccatgtgcatatttgtctacatgcctgtcttccactaaacttgatgacttttattatttccaaagctagcatagtgtgtgttataaatagtaagtttgtatgattaaattcaatcagaatgacaatattcttttaacattaggaaggctttgattggttgactaatggggccagtctcactaaaatgaaacagttgggcaaggtgtgaccctcccttcccttgagagtctcacctgcccaaaggtaatgggaaggcaggaccgtgaccccaggttagaaaagaccaggggacttagcagagttttattactttttttttttgagtcagagtcttgctcggtcacccaggttggcgtgcagtggtaaaatcacggctcactgcagcctagacctcctgggctcaagccatcctcccacctcagcctcccgagtagctgggaccatgcgctgtgccatcatgcctggctaattattttattttttgagacggagtctcactctgtcatccaggctggagtgcagtggcatgatctcagctcactgcaacctccgcctcccgggttcaagcaattctcatgcctcagtctcctgagtaactgggattacaggttcatgccaccacacccagctgatttttgtatttttagtagagacggtttcgtcatgtcagccaggctggtctcgaactcctggcctcaggtgatctgtccgcctcagcctcccagagtggtgggatttcagacatgagccaccgcgcctggccaacgcccggctaattattttatttttagtagattcagagtctccctttgttgtccaggctggtcttgagctccttagctcaagcgttccctcattctctgtccccagaacactgggattacaggcatgaaccattgcatcctgcccgaattttattgttaattgtagcatcctggtccattttcccgtcctgatcagaaagagagctgtgggtcttgttatcttttgttggtggcaattggactgtccctggagtatctgtgttggactgggggcactaagacattacgacattggagcttgctcagaggggagggaccaggtaggtcagggtttctcaggaggaactgtgaagaattgtaagggtatatttgcctagagacagaaaaacttgccaagataaagcccccaaatatccaaaggtaactatgcggaagagaaattgaacctgtatcgcataatttgaataaggaccaaagggtgaaaattccttggagacccccgctccccagcataaggaagaattcctgtagttaactaaaattcagggcttgactttggagataatgagttccggtcactggcgtttgttcaggcagagaaaggttgcactaattagtggttattgaagtgtggatgccttatgagtcagagcttgaacttggtgatataaaggtcctttaataagaatttgaggaagacgcccaatatggcacttttctcgaagtacttggagacaacaacctttttttttttatttttttttgagatggagtcttactctgtctcccaggctggagtgcagtggtgcgatcttggctcactgcaaccaccacctcccaggttcaagtgagtctcctgcctcagcctcccgagtcttagctggcgttacaggtgttagccaccagacctggccagagacaacaactttttaattctgagattctgtggtagcatatgccagacattagccagctgcttaacttttgtccagtcttttttttttttttgagacagagtttcgctcttgttggccaggctggagtgcgatggtgcaatcgcggctcactgcagcctccgtctcccaggttcaagcaattctcctgcctcagcctcctgagtagctgggattacaggaatgtgccaccatgcctagttaattttgtatttttagtagagacagagtttctccatgttggtcaggctggtctcgaactctctacctcaggtgatccgcccccctcagcctgagccaccatacctgtcctgtctttgaatactgtctcactgtttttgttctgagtctttgaaaagaatgttaaaggtcaatagtagttggaagaactaagcctgactgtctcccaactcatggttttaccaaaaactctattaaaaaactgttgtgggccgggcacggtggctcatgtctgtaatcccagcactttgggaggccgaggagggcggatctacaaggtcaggagatcgagaccatcctggctggcatggtgaaaccctgtctctactaaaaatacaaaaaaaaaattggccaggtgtggtggtggatgcctgtagtcccagctcctcaggaggctgaggcaggagaatggtgtgaaccctagaggtggagtttgcagtgagctgagattgtgccactgcactccagcctgggtgacatagtgagactctgtctcaaaacaacaacaacaacaacaacaacaacaaaaaaaaccacaaaacttgtttggctggatatggtgtatgcccataatcccagcactttggtaggccaaggtggacagatcacctgaggtcaggagtttgaaaccagcctggccaacatggtgaaaccctgtgtctactttaaaaaaaacccaaaaaacaaaacaaaaaaaaccacaaaaaattagtcggtgtggtggcacatgcctgtagtcccagctagctgggaggctgaggcaggagaattgcttgaacccgggaggtggggaggtttcagtgagtcgagattgtgctgctgcattccagcctgggcgtcagagagcgagacactatctcaaaaacaaacaaacaaacaaacaaaaaaacaaaacttctcaatttaaaatatttactccaatttgtggctcacgcctgtattcccagcactttaggaggctgaggtgagcggataacgaggtcaggagatcgagaccatcctggccaacatggtgaaacccgtccctactaaaaatagaaaaattagctaggcgtggtggtgggcacctgtaatcccagctactccagaggctgagacaggaaagtcgcttgaaccagggagttggaggttgcagtgagccaaaattgtgctactctactctggcgacagagcaagactctgtctcaaaatatatacatatatatgtatatatatataattttcttttttactccaagtaagctaggagtatcttcagtattgctgaaggctttatttaatcatgcagtgtgtatttgatggtggattactctctgaatatttattcagttgaatgtggaatgaggtggtatgaagatgggggtgggggtgatttggaggtcctttgactattcctgctggctccctggtgagggtgtggcatctctgcagatgagttctcctgactgtgctcaggcggctgtctgtgtgcccatcgctcctgcctgcttttctctttccttcccacttcctcattgtgtgagaccatccactccgtgtattactggttcctttctacttcatcacaagcaggtagcacttaggatattctagatggagctcagggctttcttcccttggagagcatcatctgtaaacaaccatggaagtggatgtcacccacttcacagggtggggaagcaaccacagtgagtaggtagttttccaaggaaccacggcttgtttacgataaacacccagttccacttccaagttcctacgctgtgaacattactgcttccctgtacagggaaggcagggtggtaaatccttgattcttagtgcttgctggctttttagagtgacatgaactcaagaattttaaatgtaggttttaaattcaattcagtcaattcactttgaagcccacattctcgttaaggtcaggaattgccctatcaaatttttttttttttaatttttaaaatttttcgtagagacagggtttcgccgtgttgccaaggctggtcttgaactgctgggctcatgcagtttgtccgcctcgggctcctaaagtgttgagattacaggtgtgagctgccgcacccggtccagtttggtttctgtgtccttttgatgtacacttcgtctttttgaagtttttaaactttattttgaggtagttttagatttacagaaaagttgtaaagatagtacagggattttcctgtataccattcacccaacttcccttaatctttctgtaactgtggtaactgtggtgaatttctcaaaagtaagcagttgacaccgctacagtattgttaaatgtggactttattcatattccacctgtttttctgctaatgtccttttcctgttctagaaaccatccgaggaacccagattgtatttagttgtcatttactcttagttacaggttgtctgtcccgttgtttttcttgaccggggtgtgtgtgtgtgtgtgtgtgtgtgtgtgtgtgtgtatgtatttttttttgtttgtttgtgataagttgggcctggttagtgcttggatgggagatagggtctcgttctgttgcctgtgctggaatgccgcggtgcagtcctgactcactgtagccttgacaaccttcctggctcaagtgatcctcccacctcagcctcctgagtagctgggatgacagacacatgccaccatgcacagctacttaaattttttttttgttgcacagagttctcactgtgtttcccaggctgatcttgaactcctgggctcaagcagtcctcctgccttggcctcccaaagtgctggaattataggagtgagccactgcgcctggcctgagtctgtgattttggatagctttttaaattttcttgcttgatctagcattagccagtatagtaaatttttatttcaatttaattctgaattgacctgtactttatagctggttttgtccagggcaggaccacagattgtatctgttgtgataataatctacacatttattcatttttgtttgtttttttcgacttttttgagatggagttttgttcttgttgcccaggctggagtgcaatggtgcgatctcggctcaccgcagcctccgcttcctgggttcaagcgattctcctgcctcagcctcttgagtagctgggattacaggcatgcgctaccacgcccggctaattttgtatttttagtagagacaaggttgctccatgttgatcaggctggtctcgaactcccgacctcaggtgatccacccaccttggcctcccaaagtgctgggattacaggtgtgagccgctgtgcccagctattcatttttagttttaattttttttttaaaaaaattattttcatttttttggagacaggtctcgctctcaccccaagctggagtgctgtggcacgctttcgaactggtctccaactcctgggctcaaggagtcctcccactttggtctcacaaagtgccaggattacaggtgtgtgccaccgtgcccagccaatatctgcacatttataagctgacatctctgagagcacagggcaggatgaaattagaggctgctgtaggtcagggtaagggataatgatgctggtgaagataaagaacagtgaatgaatttcatttatttcagaggtagactcggcagaactttgtgatttatttgtgtctgtgtgctgagtgtagtgacgttggcgaaggtgaacatttcacaggcacctcggagctcaaggtagaatttactagaaaatgaccaggtatgtaggaggtggggaggattaagagttaaattttggtcgtgttctatttaggatgtctgctggacatccaagtggctgtgtcaagtagtcatctgtctatttgtgtctgaagtgcccaggagaggcctgagcttggagcttacatctgggactcattgctaagtaaattatatttatgtaatgggaaaggatgaaaacccacatgtaggatgagagttggccttgagcctttagcgttcccgtagtttcttttatttatttatttatttattttgagatggagtctcactgtcgtccaggttggagtgcagtggcgcgggcgcgatctcggctcactgcaggctccgcctcccggggttcacgccgttctcctgcctcaccatcccgagtagctgggactacaggcacccgccacctctcttggctaattttttgtatttttagtagagatggagtttcaccgtgttagccaggatggtcttgatctcctgacctcgtgatctgcccgcctcggcctcccaaagtggtgggattacaggcgtgagccaccgcacccggccagcattcccgtggtttcttcagcgggccagtggaggggtgaaagctggtggtggaaggcagatggagagagaagttggacaaggagagctgggaaacgtctgtgggtggtgctgtgggttttttactgaccttaaataagagcctccagtggcaggcagtggggagctgcagcaggactgggggatgagtccaggcaaggaagtggagcggctaagggtaagcagtgcaggaggagcgcagaggtgagggcatccactccagggggtggctctcatactgcctttatgctttccttgtagggtagccttcatttggtaaggaaactagccatttgatggagtgctgcatgaataccgagtgctgttagtggatgctgcacgtacatgacagagcaggctttcagtgagagtgtttttggtggtgaagtaaatcacagcattccccagctggccacgcggccctcacccacacccacgttctcacctctgtgctcactgcctcgggaggtgtcttcctcccattcccaccaccatatgcacaaacacaggcacacaagtgcagatagaagatgagctgtttggacttgcgagggcatgtgtgcttggtgtgtggcacattgaatggcctcttgctatatatagtgctcagaggggatgatccagatgtctggcatggggagactggtactgagatttctgctcttgttctgttagtgagagtggattagcagcttccctctgtttctgctaggtactgccactggcatcactgccaaaatgccacctcagatcgttggcagcaaactggagctggagtgaaaataacctcacgtagtcactcagccaagggaatgagggagacgtgaagaaacgctggctttcctgctgcttgttgcctgctctgtcttgtgtgctgtgactgatgggcaggtttttagttactgaaagaagattgcggtgttcctacttacgggagtcgactcctgtcttttctctagagactggtcggacctgtgtggcttgaatcctgtatgttgccatgtcattctaactaccagggaggaaatctttcataactaggggttccttaccttgtaacttattacatgaagtccctaatattttatattgattatttccaaatggagtggaaagaactgtgcagtggtatacccttaggcacattctccaattaatattttatctttgttttattatgtatccagcaaagctgataacgttaaattggaataattacaagaaaataggaacaagtttttttctaagttgtaattttaaaaatactgggaacaaatctacttaagaaaaagaacattttgatactctaaattccgtatcttgtagttggcatattaaacttaacacctagaatctttgctgtcatgtatttgaagatgtacatttcttttctaagtttgatgttagtcattctgtcgaattgataatgtagtttatatacatctaaatagatcctgatttccattatagttttttgtttttttgatgaaaggacttccataaaaacaagagttttaggtccaggtttggtggctcatgcctgcagtcccagcactttgggaggctgaggtgggaagaatccttgagcccaggagtttgagaccaagatcagcaacaaagtgagaccctgtctcaattaaaaaaaaaaacaaaaaacaaaaaccaagagttgaagtttccacagatgtgtctttgtggctttgtgatactgttgtccttccttccttccttccttccttccttccttccttccttccttccttccgtccttccttccgtccttccttccgtccttccttccttccttccttccttccttccttcctcgttccgtcgcccgggctggagtccggtggcatgggctggagtctggtggcacgatgtcagctcactgcagtctctgcctcctgggttcaagcaattctgcttcagcctcccgagtagctgggactacaggtgtgcaccacgatgccggctaatttttgtatttttagtagagacaggatttcaccatgttggccaggctgatctcgaactcctgacctcaagtgatccacctccctcggcctcctaaagcgctgggattacaggtgtgagccacgcgcccggctgtgcagattcttgattgttgttttaaaagagtaggttagccagtcaaattgaaagaagtaaattggttaggaaacgtcacatcttaaagcagcagtgtgcgtagttcctccttgtgggaccagaggctacatcctccattagagctggcagaagcagaatgggtttcattgtacattttactgcccggggaagtaacaaggttgaaccacgtaatccataggggaacttagagaatgaatctctgctgctggttttccaccttccattcggtagtgatactatctaattagtgtggtcaacagggcaatattgtatttctttggtagaggaatggatgggagcttggaaccagagggtaaagttaacgctaactgctgtgtagtcaaaggtctttctctcttgggagatgtgtgggagggcttttgctgttccctcgtgtgggtgacagaatggtggaaggatggctttctattgttcccatgtgaagttagttcagggcagggacaacgtgtttgtccttggagccccgtggtcttgcccgatgcctggcacaggaatgcattgaatgaaagaggtaactgacgttccctgagcacagaccgtgtctaggaacacatgacagactttgtcagctagtggtcaagtggcacggagtctctgcctagagtcacctgttgtttagtttaggctattattaggctatttcagagcttttttccccgtctctagaagggtcttagggcatgaatctgggaaccagttcccagacaaggtcttggcccagcaggctagtggttagctctagtggaagttccctctgtaggccagtaggtgctaaggtgacaccaccccttcctccctctccagacccatcccaccaccgtgatttgcccatccccagcagcctcatcactgaccacctgtttttacttgcaggacccattccaacaatctcgtaaaacatggtggattactatgaagttctaggcgtgcagagacatgcctcacccgaggatattaaaaaggcgtaagtagttttatttctgtggtaatgcattttcacagtggtacattggtaattgagtagtataacttcttctattgcctatgaaaatggcttttaatgtagtataccagtctttgaatgccacatagtttaatttgacagagcagttaacgagcatttgcagtctaggcctgggctttgctcttcattagtcagtcacttggtttatatctgaagttgatgattgtttcactgaggatgtgagataatcccaaacatcttttacattggactttgaaaatggagctgacttggcattcttgagtgcccctttggaaggcaggggcccagagtacatagcactcaaattttcttgttgtgattgttgggctccggcctatgccactggagtcccttctgattcatatgaaagttcgagaactgcagcgctgcctgtggtacctgcatctgtgtgaccagggcctggccattgtgaggagggcagttcagccacagaaggctctcacggtaaccttagtctgtttaattaatgaggtgttaactgtgaatgtagagtatacagcaaagacgtcatgaaacagattgttagattttaacatagctagagagcagttagcctggaatagttggaaccaacttaaaaaaattgttaataaataatggagtgtctatactgctagacttagtgggtctgaagatagaattaacttttttgggggccaaatagttcattttgcttaatttttaaattttaataaaaatacagagtctcaatatgttgctcaggctggtctcaaactcctgggctcaagcgattctcttgccttggcctcccagattgctgcggttatatttgtgagccactgtgtgtagctgagatagttcattttaaaatgctaaattacggccaggcaagtggctcacacctctaatcctagcacttcgagaggcctaggtgggagggtcactggagcccaggggtttgagaccagcctgggcaacaaaatgagatactgtcttgaccaaaaaaaaatagttgggtgtggtggcacatgcctgtagtcccaactgctccagaggctgaggcaggagaattgcttgagcccaggaggttgaggctgcagtgagctatgttcgtgccactgtgttccagcttgggcaaccaagccgagaccctgtctcaaaaaagccaagtcaggatggctgacgttgcctgaaggttatttgaaacctctgccgaggaacctagtagaagcagtctactgaggagaggtcaggcaggccctgatgctgtcactagtagagtgaggtttcccacactgtgaggaagcctgtgctgcacacttgaggctcacactattcttatcagtaatgttaacagccaggcatacttgacagattataagacgaagacagttgggaataccttactcctctcgaataagttaatggatgtattagtctgtttttacgctgctgataaagacgtacctgagactgggaagaaaaggaggtttaatttgacttacagttccacatggctggggaggtcttacaatcatggaggagggcgaaagacacttcttacatggcgacagcaagagaatgaggaagaagcaaaagcggaaaccccttataaacccatcaggtcttgtgaggcttattatcaggagaatagcacgggaaagactagtccccatgattcagttacctccccctgggtccctcgcataacacctgggagttctgggagttacaactcaagttgagatttgggtggggacatagccagcccttatcaatggataagcataatatgtgtacagtgctttcagtaatgatggaaattacatacctttatgatagaggtcattagagagtagattggttttagttgtttctgagaacatacaggttgctgagtgtctctagcatgacgttgaagtaggaatttagaaaaggctgttacctttaaaagcagtgagatttcctgcactcctgagtgtacagttgtataaatgctgacttttaaaaatgagcagaatgatagctatgggggcgtgctgttagtctatcttgtgtacccttggctttgtgtgttgacagtttttgattgaagacttaaaggtctgtggctgccacctgttctgcatctctcctgagataccagactcttcctgggtttgagtcacacaccatgggccttccttccttggtgctgaagtactggtgtgcaggtccaacagatctgaaggtcaacattcaaagtcatttggcactgtttacacttgcatatcgtgttgtattacaccttgatttttaaatattttagtagtgtatgactggggcatacacagttgaatcttgtcctgcattctcatccattgccaagttttcatatgaacactagatgataggtagtactgcacactaatcattttttctcttttgtcttttgtatggtctgttatttttgactgaggatttctggcacatttagggttatttgatccactgctacacgtttttttttttttttgagacggtgtctcgctatgtcacccaggctggagttcaatggcgtgatctcggctcactgcaacctctgcctcccaggttcaggcgattctcctgccttagcctcccgagtaggtggaactgcaggcgcctgccatgatgcccagctaatttttatatttttaatagagacggggtttcaccatgttggccaggatggtctcgatctcttgacctcgtgatctgcctgcctcagcctcccaaagtgctgagattacaggcatgagccactgcgcccggctgctacatgtttgtttaggtccacagtgacataaattactgttaagtattctggactccagctttaatcagattttagtatggttaagccaaggttttgttgaacatgttgtaagttaaattgagccacaacagctttacagtaataacttgcctagtgttaaaagcactgtcagattagtatactagtctgaaattttgaggggtatgctgcttctcttttttaacgttaccctccttttgaatatatgctgcttaggttttgctaattagactagaggatttttttgtattcattcattcattcattcattcattcatgcattcatgttgagccggaggctcgctctgtcacctagcctggagttcagtggcacgatgttggctcactgcaacctctttctcctgggttcaagcaattcttctgtctcagcctcctgagtagctgggattacaggtgcgtgccttcatgtccggctttttgtatttttagtagagatggggttttgccatgttggccaggttggtctcgaactcctgacctcaggtgatccacccacctcggcctgccagagtgctgggattacaggtgtgagccgctgcacccggcctttttttttgtatttaaatagcgtgcaattatttggtcagttggaactctgcaacagaatatgaccttggtcatagaatctttgtagaagtcagtgttttaactctgtttagatcttgaatctggcacagagggtgtttgaaagattctgagatcctggcctgttgggtggcaggtgattcacctttggcacacagatgagctaggtagtggggctggctgaggaagtagggtcctgggaatcagaacatggaaggatatgaatggtgatgttggatcttgctgctcagtgacccaggcctttttttccctttttaaaaattttttgagacggagtttcgctcttgttgcccaggctggagtgcaatggtgcgatctcggctcaccacaacctctgcctcccaggttccagtgattctcctgccgcagcctcctgagtagctgggattacagtcaagtaccacaatgcccggctaattttgtatttttagtagcgttggggtttctccatgttggccaggctggtctcgaacttctgacctcaggtgatctgcccacctcccaaagtgctgggattacaggcatgagccaccacgcctggcctttctcctttacttcacatacttgctcagtcttgtcactgtcagtccacgttgtggacactgtgatctttatttttctatctctagaggttcgtttgtattatgctatcaggatttttattctaaaacttactttaatgagtatttttacaattttaattttgagacagtcttgttctgtcgcccaggctggactgcagtggtgtgatcatagctcactgtagccttgaactcctggcctcaagcagttgtcacgcctcagcctctggagtagctgggtctatctgtggctgcacgccactacgcctggctatctggattttagaactttgtgtatttcattgtagaggaaagggaggttttacagttaaaaccagtattcatctcaccagttggcagctctgaagccattctcgtggttaatgatgttagtttcaaaagcatagttgatttctggatttagaatgtgatctatatcctttattctttccaagatatcggaaactggcactgaagtggcatccagataaaaatcctgagaataaagaagaagcagagagaaaattcaagcaagtagcggaggcatatgaagtgctgtcggatggtgagtgacagcgagctgctgaaggaccctgagcgggcatgccggaatgcggagtgggtgttgggatcctcctcagggtagcacagtatggactcaagtgacttgtttttgatgcctactggattttgggcccttctaagagatttttacttttctcgtgaagatttgaattgatttaggtaaccacgagtgctggggagctccagggcttctagtagtttctcctaggatggctgttttaaaagcgggactagacatcctgggtttgaggaacctgggagagaggaggttgcgggactcaggtcactgtgcatgtggcgtgcttgcccccgttgtgtgtgatcattctgaccttgctcacccccactggcttaaacaataccattccagtggagtcagctttactgcttgagaggatgtcattagttcccaaaaagaggggatggaacatacagctaaaatttagatttccagtttcaggcctgttttcccctcctaggtctggagcagaggtgttctatgttactggaagtcagatccattggcctagttcacaaatgggtgaggggtcagaggtcagctgtcgcctagatgcagtcagggttccatgggggaagtaaaggctgtgcatggggcctggggtgggggaacagtgacagaactggaaagccacacagtgcccctgtctgctgcagtgctgggtggcctgttgtgagcaaaggccgaggcttttccaaggttagggatggactaactgaaccctggaagtgggcacttggttaagtgtatctgcatgtggtcaggtaattggcccttatttacaacaaaaaaaattttttttttttttaaagaacccaatttgaggcagaggttgcagtgagccgagattgcgccactgcactccagcctgggcgacagtgcgagactgtctccaaaaaacaaaacaaaaccaaaccaatcagaaggaacccagtgtaagcttgccaccttcaacagctaccagcacaccaccagccttgctttctctggtgacactgtggcccaccccctttgttttagaggaaattccaaacattttacttcaaaaaatatgaaaagacataaaaacaccgatatttgaagtcttcttgaaatgtggcatttaaggtcttgaactgttgagcttattcattggaaagtttattttttttaaagagagaggatcttgctatgtttcctagggaggccttgaactcctgggttgaggtgatcgtcctctctcctcaagttccaagcaccattgcgccaggcttgttcccttagatttgtgcgctgggagtgacagaggagggcacaggcctcagtgttaccatcttggtcttcggtccttgttgtttgtgtgctaattcagtattgccagattcaggattttagggactagtaacattaggaaaagtgagggccaaaatgaagcttcatatttgatagagcagctttaaactaccacactgaaaagtcgcttggttcttttgggaggtgtatgaggtgtgtttttcatgtccttttaggcagccttcagtgccagctggagttgtcttcaaaacatggtcattgttcttgccatggcactggctacctgaaactgcttgcaagtggtttgtttctaagctcgttttcccattttgtggaatgtgagattttcttctactttttaaaaattgagaaggggtctcactctgttgcccaggctggaatgtagtggcatgatcacagttcgctgcagtcttgacctcccaggctcaagcgattctcccatctcggcttcctgagtaactgggaccacgggtgggtgccactgtgcccagctaacttttttgtattgtgtttaaaggtgggattttgccgtgttgcccaggctggtcttgaactcctgggcttaagtgatccaccttccttgcccacgcaaagtgttgggattataggcgttagccactgcatccagcctatgagattttttgaggaacgcagatggtgtcatgtcagaagtaccagtgcttctaatgtcattgtttttgttctgggatataagtagcatttggaatgtaagtgtgaagactgtcagtggagaggggcacactagccccaggccttgcatccgggtggtccacttcgagggtgaatgagcctgtagggtgttaggttggcgcctttctggcacatctgctttctcccacttgcctaggccctggcatgtttgttttcgtgctgcagatatggtcctctaattgggtttttgtagtaagatggtgcacttctgtggttgcaataatcttgtacttggtcgtgtgattttaatgtagcatgtctgggctctgtgcagtagagtgaaagaaacgatctaatggaataaagaaaaaaatttttttttgcttttgagatggagttttgctcgttgcccaggcttgagtgcaatggtgcaatctgggctcactgcaacttctgcctcctgggttcaagcgattctcctgcttcagtcccctgagtagctgggatcacaggcatgcgccaccatgcctggctaattttgtatttttagtagagactgggtttctccgtgttggccaggctgctctcgaactcctgacctcaggtgatcggcccttctcggcctctgaaagtgctgggattacaggtatgagctacctcgcgtggctaagtcccccccgcgcctactcttgttgcccaggctggagtgcaatggcacgatcttggctcaccacaaactccgcctcccgggttccagctattctcttgcctcagcctcctgagtagctgggattacaagtgcctgccaccacgcctggctaattattgtatttttacaagagatgaggtttcaccatattggccaggctggtctcaaactcctgacctcaggtgatctgcccaccttggcctcccaaagtggtgggattacaggtgtgagccaccatgcctggccgtaaatacttaaatatttctaataacttgtaaaaattcaacatactgaattttttttgaattgtttttcaggagagaggtacagaaagttttccctgttgctttgttttgttttaaagaaaaggtggccatactccttgaaattcagttgtaaaacatcgaaaactgatttacaactggggaaataccttatctattgaattaagggtttaaaaggaacttggccttaccgacttttctttcaatttttagctaagaaacgggacatctatgacaaatatggcaaagaaggattaaatggtggaggaggaggtaagtacgtgagttttttctttgaagacaaaaggtcttggcaagtaagttgagtttgtaaatcacgagtctcttggtcagagtcgattttgtatcagtaaatagagatgcaacgtagaaagcgaactaaattggggagaggacagagaaattgatggcatttaaaagtcttttacgagactagaagtatatgttgatgtattttttatagatagaaacaatttgtaaccatactgcaatatattgtgaacatatacccttagatcagcacttgacgttatgtcaaaatatcctaagggtttaaagagcagattttcctgaaaagctaaaataatgactttgaagggcgtggactttgtccccaaaagttcccacggtcactgggctgtgaccagcctccccaggggtgttgggaaattattgctccaaacccactggggccacgcggcagcttctgtggctccaggaggccagtcgtcgaagtggatgcagatactcttggtcttcataaaccttcataacaaatcataaaaatggtgtgtaatgttacatgttatatgccgatcacggatttagagatggtgaaaagtagtgtcgaaggggccactgctgcactcatatgccatcagcgctgggcacactcactctctgtcagtacagggctcatgttttgaattatagagaacttcaggtttatgaaatatttttgtttttattagttcatgatttgtataatgttttgtcaacaaagaattctttgcctacaaagcaccaaaattcataaactaaaagctgtgttgtatttgtgcaggtggaagtcattttgacagtccatttgaatttggcttcacattccgtaacccagatgatgtcttcagggaattttttggtggaagggacccattttcatttgacttctttggtaagttaatcacgtgggttgacttggtgtgtgtccatgacccaaatgagggcttacttagtatggcctttctgttgaattaacattgtattttaggctgggcgcggtggctcatgcctgtaatcccagcactttgggagcctgaggcgggcagatcacctgaggttgggagttcaagaccagcctgaccaacatggagaagccacgtctctattaaaatacaaaattagccgggcatggtggcgcatgcctgtaatcccagctacttgggaggctgaggcaggagaatcacttgaacccgggaggcagaggttgcggtgaactgagatcatgccattgcattgttgtctgggcaacaagagtgaaactcctgtctcaaaaaaaaaaaagttaacattgtattttgtcacgaaactttgtgtttaaagcagcattggactagcctgaacaacatggtgaaaccctgtctcaacaacaacaaaaaaaatactaaaaattagctgagtgtggtggcgtgtgcctgtggtcccagctacttgggaggctgaggtgggaggatttccttgagcctgggaggttgagattgggccactgcactccagcttgggtgacagagcaaggccctgtctcaaaaaaataaaacagcacagtagctgtaaaatcttttctcttcttcctctttgaaaatttaagttacagcttgaaaaattaaaataataaagggtttaatgtatttttttctttgttatgtatggccttaattaacttgcttttgccctcagaagagacagtggtaagggcatgggtgcgagtgtcttggaaacgttgtttcccattgaacaaccaattggtgtgtgaatttgccacatcatattcctggtaaaatcattaagcaccatagtactgttggcaagacctttcatccgtaaacattgtgtgtgaggactgttgttgagagtttgcggaaaggcacctctagagcaagactgcggaggcctttgctgaggagagaatggttttgttaagggagacagtgctgttatagctgctgtttgattgtaggaaaatggatttctcatcagtggcatctcagtcctgatgcctggtcctaggcgttggtgtatgtcttgggcacagtttgggtcaggcacttttgttagctgtctcctgttagagtcttctcaaccactgggacttcctgagtggtgcactgggtgacctgagaggtcaggattaaacatgtactcctgtagttgtttttgtcttttgacttattgaaagggaaacacattgtatgtttacctccttcattgcctggagcttgggtgaagaaactgaacaccacctgcaactcgaggagggaaagagaagagtagttgtgtctacagataatacaggggagaaacgtggagctcctgcctgccgcaggcacgaagaagcataatcactctcatatctggtaggtcttgggccttttgcatggtgcagttcttcagtgtgtctcaaatggggattcaaagaggttgttcttacaccttattatgggctggctggcttgaagagagcccctttctgagggaggaaggacagtcagtggcctcaagcattttcagggaaactgaagctgagcaggcgatttccgattaggggaccgggagactggcgtgctcatcgtttaagtgcatttgctgtaatcactgctgccatcagcagaaacagagctcaagaaagaaccatgtttacatccgtccttcatcaaccctcacaggcaagaaatatttctctaagaaaaataatttacggattgatctctgtcttaaaaatgacctttgcatcttgctgtagccttcagcaaactgcatttgttgctttgcaggacagggcagtgtttgggttgaagtcctgtgttctgatcggtgattctcatggtgaccaagcgaggaagaaggcccgctcttccaacaccatggcttctcttctggggcacacgaggtgaaacgggctgtcctcgtgatgtctgagaccgggcgtcttcaacaggccctgcttaacattatgattaaacagggctttcttaccattattattaaacaggccgtttctcaacattattattaaataggccccttcttaacattgttattaaagaggccctttcttcacattattattaaacaggccccttcttaacattattattaaacaggcctttcataacgttattattaaacgggccccttcttcacattattattaaacaggccccttcttaacattattattaaacaggcctttcataacattattattaaacgagccccttcttaacatcattattaaacaggcctttcataacgttattattaaacgggccccttcttcacattattattaaacaggccccttctcaacattattattaaacaggccccttcttaacattattattaaacgggacccttcttaagattattaaacgggccctttcttaacattattattaaacaggccccttcttaacattattattaaagaggccctttcttaacattattattaaacaggtctttcataacgttattattaaacgggccccttcttaacattattattaaacaggccccttcttaacattattattaaatgggacccttcttaagattattaaacgggccccttcttaacattattattaaacaggccccttcttaacattattattaaagaggccctttcttcacattattattaaacaggccctttcttaacattattattaaaccggcctttcattaacgttattattaaatgggccccttcttaacattattattaaacgggccccttcttaacattattattaaacaggccgtttctcaacatgattattaaacaggaccttcttaacattattattaaatgggccctttcttaacattatgattaaacaggtcctttcttaacattatgattattattttaattcaaaggggaagggtcccttagtgactgaattgtagctaatttttgttttccttggggaaaataatctgatacaccaagccatagagcaattacttgtaaagaaggtatagagatctaattagatgtgagtgaataagtgagtttttacccctagtccaaggagagaggtgctagtcttactgaagcgctttactgttaaatgctccattttacatgcagacctattttaagaccaggtaccctgtgtttcccatgattagtgtggcagtgatacttgttcattccgttcttataggtgttctagatgacttccattttcaggctctcaggatttacacactggggaagctgctgctccatggctgctatatgtatgtagtcactgagcagcctgctgacggtatgtttaatgtagatgggtgtggatgcagagccagagggatttccgcttattcatgatgtagttcaggggtcaacaccctggtctgtggcctgttacgaactggcctgttgggaacaggaggtgagcggcgcgcaggcaggcaagcattactgcctgagccccacctcctatcagctcagtggcagcattggagtctcataagggcacaaaccctattgtgaactgcacacgcgagggacctaggttgcgcattcctcatcagaatccagtatctgaaaccatccccctaccccaacccatcacccactgtgtggaagaattgtcttccatgaaaccagtccctggtggcaaaaaggttggggaccgctgttgacaaatcatatttactagacctggtgtactttccacgtgacgaaaaagtagtttaaaatgtgctgtaagatatttccgagctgcactttacatttatcagaatgcagaacccctgctgtacttcagacctccctcatgataggtggggaagggtgaaggggtgccggatgttggacacatggtatgcaggtctgtgcctgagcaccaggcagtgctcactgtcacactgtggccaaggagacttgggcctggggcctgcggtgtggaacccgtcctttacagaagaagccctcccaggagaggtcgcggaggcggattctaacaccagcctggaaggaatgctgcctctgaattggaggggtacaatcaaaactgctgaggctaggtgactgtcgaaatttccagaatgtggagcacatgcaaatgagctcttgtcgaaatgttaattggaaaatattaataggcagtggacttatttgaattaggatgctctctttattttattattagaggaccctattgctcagtgaaatgatgttctgagataggaaagaaagggtacctgataatagtgccttttgatcccattagtcacagcaggcattacatctgggaaaagcctgtgggtttaacttcacattttatttatattcttggaaaaccaaagcgaacctttaaggtttccagagaggccttttattttagcagtgcagcaagtttttcctttgtaaagcatcactgtggtacgaatgatgctctgtagcaatagaggaggagtcctgtggtatgtagaaccaaggaaagcagacttcttgcaggaaaaatgagtgcattgaggatagtaacctgactttctgacctgtgattaaattatgatagtagtcagtcattttactctcccagggtttgaggaagtggccggtgaggacttggagcctagtgaggagttagtagagctgcccagggtggaggaggccacagaggacagccctggtgaagagaacagtgaggccttggatgtgttgatatccagcaaggacctggcactgtctagtgaggacgaggcctgcacaggatgtaactggggcctgggcgagcccttcagcgaggagctggggctcatatccagcgaggacggggccagccctggggacgtagaggagctcggcgaggagtgcgaggagccgctgagtgaggaggagcacagcgggccagagctggggcgctgccggcaccaccataaagtgtcaaggagctgcccgagtgggactgacttaaaacagtgtatctagaataaaatggtttcctctagtgccttgatactgtccttggtcagacgacctcagctgccttggagatagaactgaagaagcaagagagggaggtggcagccctgaagcacaggccgggcgtctcgtaggctctttccctagaagccagagcacagaccctgaagacagccttgagtttgatccgtaccacaaaccgggggcttaaactaccaaaatgtaccatctcccagtcctggaggctggccatgtgagacccaggtattgcagggctggttgcttctgaggctgagatgtgtcccgtcttgctccaggcccttccccagctgttcttctccctacatttgcagacggatggcccatccgatgttgacatcatctcctttgtgtctgtctctgtgtccattggatttaatgttttagagacagatttcactgtgttgcttaggctggcctccaaccgctaggctcaagcagtcttccttcctcagcctcccaagtaactgatcacaggcatgagccactgtgcccagccacaagttccccctttttataaggacatcatttatattggcttagtgcccactgtaatgatttcatcttaacttgataatctataaagagcctgttcccagtaaggtcacattcacaggtactggggattaggactctaatttaatcttttttggggaccatgattcaaccactttaacatcatatttctaacgggtagatttttgtgctagtctttgaaattcacagccaagcagcaaattttgaaaggtgaaaggaggaggaacctttaaagttagacatgtgccctcacccctcgctctgagacagagttttgctctgtcacccaggctggagtgcagtggcacagtctcagcttactgcaacttccgcctcccaggttcaagtgattctcttgcctcagcctcccaagtagctgggatttcaggtacccaccaccacacctggctaatgtttgtgtttttagtagagacggagtttcaccatgttggccaggctagtctcgaacttctgacctcaggtcatctgcctgccttggcctcccgaagtgctgggattacatgcgtgagccaccatgcctggccaaagttagatgtgttaatgagagctagaagttaggggtcaagtacaggcatgggagtggcacagcagattggatcggtgtgtgctggtgacctggacccactatcattacacggcgctacagcagtttgtttgtaatgagtgttctttgattactttggacagagttcatacacaggcacacctacacacaggtcacttagaagaagttaaggagtctttttaaatacacataaaaacatcacatactaagccaggcatggtggtgtacccctgtaatgccagctactggggaggctgaggtaggagattccttgagcccaggagttcgagtccagcttgggaaaaataatgagatgccatctctaaaaatttaagaaaaaaaggttaaaaaatgaaaccgtgatgtacgagactggtttccagctaaagttgttggaaccatccttgtgtgtaatttcacatggtcgtgaagcagtgggcagtcccgcccggcatccccacgcgctcttcctctcatctggtgagagtttcttggagaacatgccaaactcatgtatggttgtgtgcgtatttgagaactcctcgtgttgagatggagctgttttttggaagtatctcattttttttgagatggagtctcactctgtcgcccagctggagtgcagtggcgtgatctcggctcactgcaacctgtacctcccgggttcaagtgattctcctgccttagcctcccaagtagcggggattacagacatgtgccaccgcgcccggctaattttgtatttttatgagagacagggtttcttcatgttggtcaggttggtctcgaactcctgagctcaggcgatccacccacctcggccacccagagtgctgggattacaggcatgagccaccgtgccaggccgttcatttctactgaaaattatcctggctagtgaggatgggtgccatgttagtgatctgcgattcttttgtgctgtttttcagtacatacttggtcgtttcaggacctttgtttcctctgacgtcctcccttaaatagggagaggaaatggttcctggaaacggtcattttgagaattttctgtgctgtgagaactgaggctctggctacccctctaaaaggcttgagccatgctgtaagagtttgtgggcagtgtttctgtggtgtttcctcccttgtattttgtggtgttggtccccctaacaggtctttgtatagtgtttggttcacattgttggcatgacagtcacctgagcaagacgttgcctgagtcctttgtcagtttgggttttcgcatcatctgtttccagtgggattttggtccctggtcaacttgtggacaactccagagattgagatagttgccgtatccttagtgctcccagggggagatgttctgggactgtaggtgcaagatgtaggaagagtgatttaaacttgaggctgcaggcagacctgatactgtgttgggctttgacaggtttagggaataccagtatttataggcagtatgatagtgtagggggacagtgaggtggaaggtgtgatggtggaggaaagatgaatcggccatctgcgagtagggctcagaaaagagcctggagcctgctgctgttctggtggtttcttccctgagcaatgaggactgtggttgggaagaggcccattcctcctgacgccagagttcctcatctcatgttggctcttttgtatttgaaatagaataatttgattgcagtgtattgtggattctttgacttcgatagatttttgtaacttttgggaaacagattactctaaccagacctgggaagtagctagaaattatacttgtaataaaaaacaattatatgggaagctgaaaatggtggtgttcatttaacaaatatggcgtgcctgctgtttagtgccaggcactattctaggtgctggtttggcagtggagagaaacactgaagccctgttctcagggcgtgcacttcagggcggagctccggccgtgttcttcattggctcccattgcgtgttgtattccagattcctaacagttaggttatttgctacttctgaaaatgtgagttgtaataaatgagtgcctggttttgagaggagttgggagagcagaggaagtctgtctttcatgcttgccttttgaatctcaagcgtttctcccttttgagggcggctgtctaggttttagctttggaacttgaggagagagtgacatattttcctttgtttgaaatagccatggtgctttttcagttttgttttgctgtcatttttttgttccagcttttctgtgcacttggggaattgacagtgggtcctgaaatcatgacagcaggcctctcctgggccgcggctgggagtgtgctgaggaagggcgagcttagtgctgccctgagatgaacgtggttggtgggaatcccttcgcttcgttgtgaagctgttcctgttccatcaggttctcatgcttggtaaagctcagagaaaatgtgtgggtttaaaacatgttctccacttcctcagtgttcttcaagtttgtatgtgggtaaatgtttgttacatgtgttttgtggtcagttttctcacactgttcattgtatatatatattttttggtcataaatttgtgactgttctttagatagtcagtttagtatcttgttaatgttatgggccccttaatgcattggtcttagtattcctcagggaatagcatgatattgcaaaattttaaagaagctcttgctatacgatgcccagaatgttgaaatggaagaagtgtcactgaaaagagtcaaactgtaaaatatttgaagagatgtattctgagccaaatataagtgaccatgctggtgacacagcctcaggagtcccaagaacatgtgtccaagtggtcagggtgcagcttggtttatacattatagggaggcatgagacatcaatcagatcataacctgtaatccctgcactttgggaggctgaggcggatggatcgcttgaggtcaggagttccagaccagcctggccaacatggtgaaacactacctctactaaaaataaaaaaattagccaggcggggtggcaggcacctgtaatcccagctacttgggaggctgaggcaggagaactgcttgacctgggaggcagaggttgcagtgagccaagatcgcgccactacactccagcctgggcgacagagcaagactccgtcttgggaaaacaaacaaacaaaaagaaatacattgttttggcccagaaaggcaggacagctcaaagcaggggggcttccagactgttggtgaatgaaaacattttctggttgacaattggttgagtttgtctaaagacctgggatcatagaaaaaaaatgttcaggttaagataaaagatcgtggagatgaaggttcctttgaagtctcatagtggctgcccttagagacaatagatgacaaatgtttccttttcagacctttaacatgtgctagactttcagttaatctcttcaggattgggagggtctggaagaaaaagatctagccatgttaataagactgttcacagatgcacatttcccccacaaaggatggctttgcaggacaatttcaaatggtttgtagggcatgactccccagaccccttaggtaggaatttgggcaagataaaaaatcagaactcagtcctcaagagttaaatcctaatgctgtttcaagtaatgtttgtacctcaggatacaaagttaaggtttgaagacccatttaaagatgcttctgaagagatgagcatacatgttttgctttgcagaatctgcatgagtctagagaaactgccactgggggagaaacgtgtattacaaggaaggtgctcacgactctaaccctcaccactgtggaagctagccagtaaaatctgtcaggactggagcagtctcctcccccggggtgggatggtgtggggtggggatcacaggcccccaggtgattggtcgaggcccatccacattagggaggcaagctgctttaccagtctcctgatccaaatgctaatctcatccagaatcacccagaaggatgttcggctcaatatttgggaactctgtgcatggcccagttaacctgaacatgaaatcaaccacatgtccatctgttgtcaacttggcacccatatgcatttccttaacccagggcttaatcgtcaagtgagggcaagaacaaggtcatagccacctaacacgatccactatcccacagacaaccaacagtgcactagccccttgcccagcgcaggtcacgttctcctgtgatgtttacggttctccttgatacggggtaacttaataggcaatatgtgtgtattacataagaggataagagagggaagaaaactgctatgtgcctaaatataacatgcatagattatatatgacaagtattggtcacaaaataaggaggaaatactccaggcattgatggtcctcgttcctgtaactggtcctgtggacacagccactttcttccactgcccattctgtggtcttgtggccttcagcaggcacctcactggttgtggttctttctggtgaggtaaagtaaaaaagaagttggtagcacatttgattaacacgtgtcttaagatttatttctaaggtataaaagtatgatcagttgtttataaatccaaaagtaataatacatgctgggtttaagatttgaaaatgggaatgaggtgagaggaggaggaggtcttgcccctccaccccagttggagccccacaggaacgttgtagcacgtgctgtatagttgtgatgcccgcggtcggagccccacgggagcattgtagcacgcgctgtatggttgtgcgttgtagcgtgcgctgtatagttgtgatgcccacaggcttccttgcatttctctccagctctgctagccacgaacacttcaagtctgcacttcacatgcttgcttgcctgtgcatggttacgcacgctcagcaacttagttccacgttttgggatgagttgagttccctgacgtagaattgctgggttgagggttttttataataaaaatattggttttattttgggggctgaaggttttaaaagcttaatacatacttctagattgcttttcaaaacgacagaaaccagcacatgataagtagctcttacttgaaataaggacttgtctgatctcaagtggcaacttttaactggtctttaaatattataaattttgaaattattttaatgtttcttagcactgtttctgttacaaatgagacttcatttttagggtaatttgtgattttaatatttgaaattatacgagttaaaattcagtgaatacctgaattgtgaaaaattatatttaagctacaaaatgtcagtagagaaataaacaagataaagatttttttcatacaagaaaatggaacggaaaagcattggccttctcataacatagtactcagccagcttttgaggtagcttctgtagatgatgatataattatgaatgtcattgtcttaatttagcttagaatgcaaaccagttaaaatcacttggttagtactgttaccactgagacacgggttcaagatgcatgtaaaagctcagtgccttgtggacaacttctaagggtttagttgccatggatttaaagaaattgtgactaaaccaatgttttagcattgataaatgggaaattgcggaaggatgtaaacgtagagtttaactctacaacttggcttagggactcaggtatggacagtgagaataacttggtttagggactcagatatggacagtgagactggccacatgagtgcctttctcactgtcacactcttacccaggttggagtgcagtggctgtcgacaggtgtgatcatagctccctgcagccttgaattcctgggctcaagcagtcctgcctcagcctcccaaggaggtgggactaaagatggtgtgccaccacacctggctaatttttaaatttattgtagagaaggggtcttgctatgttgcccaggttggtcttgaacccctgacctccagggatctctcctgccttggcctcctcaggagctggaactacagatatatgctaatgtcttcaatttatggaaatgcagaaatgccttttttttttttttttttttttttgagatggactcatgttctgctgcccaggctggagtgctgtggtgtgatcttagctcactgtatcctccacctccggggttcaagcaattttcgtgcctcagcctcctgggtggctgagactacagatgcccaccaccactcctggctaacttttttgtatttttagtagagacagggttttaccatgttggccaggctggtctcaaactcctgacctcaagtgatctgcccgcctcggcctcccaaagtactgggattatagctgtgagccactgcaccctcccggaaatgctttttaacggtcacctcctaggggagatgaagagagttaccgcataatcagttttaactgtatttgtaatgtttgtttctttacctgggaggatatgttgtagatacgtgagatagaatacctaagtgacacaatggtgtgcaggctatggctgcaaagtagaaagtttctaaatagcatgcttggatttttatttgaattggatgaagtttttgtgtcctagagaaattcacaaaatgttcctagtttcagataaaaggttatgatttaacatctttgcttttgttctttcttgtctttgaatagaacagtgggggacggtaaggtctgtttgcaaagtacctatgaccatcttacattatttttatgggtggggggcattgactgtggaatgtgggcagtaacttgcacagtcagtaaccgtttgagtaacttcttgttggcatccccattctggcactcctcctctaggtctccacctcacacgctggtttgtgggcggaggggcaggttggtgcgtggggtgtccgggcactggctgtgcatgccttcttcctcttctgtctcttggccaccttttccaaaaagtcaccagtgaccaattctcccagtgtttctttgggactcaatgccttgggcttggcattgggtaaagccaactggccagtttcattctgacgagctctatagtagtccggtgtggacctctgccctccctgctctgcggaagcttcctcagcctttgcttctcactatttactatttgcgggtcctgggggtacccagcgtctcagggttttggctgcccacctgtacgtcggtcctttcaaactgtggtcagagtcaacctcaggtgctgcttttctctagtcactgcattttttttttttagtagagacaaagtcttgctgtgttgtccagcctggattcaaactcctgagctcaaggaatcctcccactcagcctccagagtagctggatcaagtcactcttgttcataacctcagttgcttcatgaatctcgatttctgcttgatttcagtgcttgctgttgtatccttgtgtgctgcagtatttattgttaacatttgtgactcaaatgtatccactccctgctttggttgctctggcctgcaagtaggccgtactaattctgtagttggtcctagcttgcctttgtctttaccttgcatgcgtttatgtcttaatgcacctattaggattccttgcttttatcacaggtttcccatttttctgaaaaaattacagtaattattaacgcagaacccaggtaaattaaaaaggtttgtatgctttatgaatttttagtaagtactcattgattgataacagcaacagaggaaaacaaaacggtcagttccgatcttgatttccaggagcactttgtgtttccacttggcagcgtgatgcttcctcatgtcggtgattttctgttgagacatcttcaagcatcatcttacgtctgcttgttaacatttgttcagatttgatttcagctaatccttaaaagttttttgagacatcaaacttagaataaaaggaatttcctttgccgagattcatcaggtatttacacttagcttacatggccacaccattcctcgtgtgtgtgtgtgtgtgtgtgtgtgtgtgtgggcgcgcgcatgttagggtaatccatttttctgtttgtttctgaattgctttggagaaggcaactcagactccaaggaatacaacagctgccgtgtgaagcttttctcacttttccagtggtcgtagcaggaacagcgtcttgacctcacatcagtgacgtgaaaagagctgagtttgaagtgcatattggtcctccataaagaatgtgtgtatgtgctgtttttttaattaagtctggtaatttatttgatacaatgtattgtagttttagttgaattaaactagttagtaaaactgttggtgaggtagtgtttcagttactctgtagataagctcttttgttaaaacctcttaagttttttgttcctgaatatgttacaaacatctattttctcttactgtagctatcacatgaggaaaaaaacttgaaaaaaagacttcatagtgtgtgtttatgtttgattttagaagacccttttgaggacttctttgggaatcgaaggggtccccgaggaagcagaagccgagggacggggtcgtttttctctgcgttcagtggatttccgtcttttggaagtggattttcttcttttgatacaggtattaaatccctaggtttaatctctgttatcttaacagcagttagtacttataaaatcataatactcttttagttagagtgctttaaaatatgtgtatacctttcgtagaatagcattgtggatttgccagctttttttggtatacaggtctgcgcttaacctacattttctcctaatcttcctaagaatgtcgtgcttggaaatcttctcctcttaatataataatcaaggccagaatgtaatgaaattcttagttaaaaaggggcaacatatgttctgcatcagtaggtggaaagtaacgcagttggaaaatctcactaaccttcatgctgtctaacctcctttgtagttaaaacaaaagtgcacaaatagcatcctaggagcatcccactggatggaatcgaaggctgggccttaccactagcccaggccaggctcactcactagtgaagtgtcagcctcacgcacgtagctcttcatagttcaccgatggaaacaagcttgtagactggagtaacatgaatatgcatatatcatgatatgcctgtgtgtttagcctgaagaatcccacttttctctgaagctcatccagtttctcttcacaaaggagcttttttttttgttgtgttttgtttttaaatttaaaaagagtctcactttagtgagtgccactcttagtgtagtggcacggtctcagctcactgcagcctcccgcctcctgggttgaagtgattcttgtgcctcagcctcctgagtagctgggatcacaggtgtgcaccagcaggcccagctaatttttgtatttttaatggagacagggtttttgtcgtgttggccaggctggtgttgaactgacctcgggtggatccacccgtcttggcctcccaaagtgctaggattacaggcatgagccaccactcctggcctggagctgctgttttgattctctcatttttatttttaagcctccacgataagaattgggagagcttgttatatagggttccttcttcatcatggtcagaattttattttctttgaacattgcgctcatgccatctaggtaagtagtgaattctgctcgattggacctcagttttgatgtgctttccctcaacagatcctctcatttgataccatggaatatgctgaccacaggttaagaaagctagttaaaaataccacgtaaattgtcctttttaaaagtaatcagtggctcctgtatgtgtgtttgtgtgtgtgtgtgtgtgtgtgtgtgtgtgtggtgggggtgtaagccttctccacttctgaggtgccttacaaagtatcacaagaataaatacttagcgaggcttaattgagaccagtgcagtagccaccagccacgtgtagctcctgagccctggaggcctggctactcctaacggagatcagcaggagtgtgaaatagtcattgggtttcaaagatggaacatgggaagcagtgtaaaataccgcaaatgattttgattttttgtatttccaattgaaatattttggatatactgtattaaataaaatactaaaattaatgtcactagtttctgctttttagtgaaatcattagaaaaggtaaacttaacatacctggttcacatatttcttcaggacaccaccagccctagacagtatctgcgcttagatgattgaatcatgttcagaggtatgcgtcatttgtgttaatgggagcattttggaaacaggacaaaagctctaaccagtagaccagctttaatatcgaaaaataggtttgctttagtgtgacttgtgaaagtttttagtgtccacactgcgataatatccataatgtataattgagaatggtgttcatgaactgtagaaccatagttttttgagacgaatacttgtattctttctgcaattattttagttttttaataatttagattcttatcccctgtggtcctgtggcaaagaggagggaagccgattaggtttgctgttctgtggtggtgaggtcactctgttcctgtggggtaagagtgtccatcacagtctgtggagtttacaagccacgccaaagcaaacagagcttgataccgaggctgctctgctggttggagcttaatactggtctcggttccagaatgttcacattaacacaacacgtgcttcatggtgccaagcagaccacccacaagcaggggctgtctttggcatgtcagaaaagctgcttgggtcccgcgaagctctgcatgaggagagggggaggggagaggctgcactctcgcgttgccctagagtccccactcagggatctgagagacagtctttccccctgggcaccccagcacttcagctgaggccttgatagttgcgtcgtttattactcctcggttctatgccttaacattaaatattctgctactgaactttcaaactcttgtctttgcattactagttgacatatttctttaagcatttttcttttctgttttcctgtaggatttacttcatttgggtcactaggtcacgggggcctcacttcattctcttccacgtcatttggtggtagtggcatgggcaacttcaaatcgatatcaacttcaactaaaatggttaatggcagaaaaatcactacaaagaggtactgtggtattctgcattttatatttttagtaagcaggcgtaacgtttcactggtgccatgttgcacgtctcccagagtgtgaagtagaggttgttgtatgctaaatctggcgccatgaaaatcttttgctctccaaattcattaattaaagccttttctcttaaattttacttaactgttgaattattagagggaatctttaatgtaatacagtgtaataagtttctgcagcattgttaaaatggtaaaatggaaaatcattaatagtaaagcctttactgttttatagcctctgcatgtatttagcatccgcctgtacggtatttgagacacaatttattttgtcaggttaattctattttaggaaaggaagatgtgttgttgacaggttggcttcagccatgtttttacagcctgaaaattacttatattcatggtgtatttcagtaatgtccttaaacaacttagttaccctcacacatgcattttctttaccagaaaggtttttaaatgaatttttttcctacagaattgtcgagaacggtcaagaaagagtagaagttgaagaagatggccagttaaagtccttaacaataaatggtaaggagcagctgctgcgcttggataacaagtaattcaacgcacgcacttaacagaaatgttaaactataacaagcaccatttgaggattaacaggaacatttttttgaagatttcaaacgaactcgactttcagtataattgtacctaaagtatttataaacagctcatcggagcctctatttgtcatagacttttgagttgattgttgggaccacataataggaccattttttttttgtctttaaaattgttgtaaatctctgtatgcactttgcttttttattaaacgtactccaaggtgagtcttgactctttagtgtaggacaagattgtacactaacaccagcatggacctgcttttcattgtgtctgaaatgtgagccacgtagtgtcggcctgctgtgaagttaacattgccaggacgattcttctacagaaataatttcaatttttttcagtatttagtagtgaaagatattaatacattaatggtaatacatttctggtttaatataaattaaggatgttttctagttgtgcatgaatgctggcaacttagtaagttttgacaattgtttaaatatgtaatgttaagcttaggtttaaaaaagtaaagctggtaaactgggtctttgtcatttgctttaaaaaaaaaaaaaaagaaaataaatgcgaatgtgttggtgcattcttcctgagtgggatctggagcttttttgtgtctgtgtatgatttgtgcctgggcttctagtgtcactttaatagcgtttcgtgctgttcattcaggtggatgccgcacctcagttacatgtagacattttcttcagtatatttgaagtatatgaagattttcatattgtaagttgtgatttagcaattgatcaaacatttaattatggtaacatttctacaggagagggaagaaaccattgtataatttttcactcttaaagtatgttctagtttgatgtaagatcacttacggatccgggcgcggtagctcaacgcctgtaatcccagcactttgggaggctgaggcgggtggatcacctgaggtcaggagtttgagaccagcctgaccaagatggtgaaacccctgtctctactaaaaatagaaaaattagctgggtgtggtggcaggcgcctgtaatcccagctactctggaggctgaggcagaagaattgcttgaacccgggaggtggacgttgcagtgagctgagatcgtgccattgcactccagcctgggagacagagcaagccttcatctcaaaaaaaaaaaaaaatcactttgggacagtcaaggtcttttgtttctcagtttgtaatatctttcatgattaccattggtaactagaatcctagctgtagtgaatattgaactagactttgactgaatttgaaactgttttggaactaaacagcgtgaaaaccgctagaaggacaggcggttccctgacaaacagcgtagcgtgttccatccgtgctggctttgcaggagggcatagagattgctcgggatacgccagagcccttaagcaacctcacgtgctgttactgaaaataagtaaaaaatattttaaggaatttcataggagctcaaaaaagcatagcaacagttaagtaattggggacagttgaagtacaagaagaacaacgagtgatgtgcttgtctgttgtgtcggaaataacccagcacgcggcacttcctgtctctggataaggtaggtatgcagccatggcacgtgcgggaaagcgggacagcgccctctagtgttggaaatcccactcacaactagcattgtgcgatcatagagcgcgcttttgtttatgccatcaggacgggtggttttttgttactaaataaattcaagtagatacttggactaaggcgttttatatttttcattagtgggtgggatgagtcagtgcagcagccttgagacatccagggatgtccagaaataccaggaaaatgaaaagtctttacctgtaattcttaaactaggaagcattttgctatagcgttggtactacacaattttagaacacatttggttgttctagactttgtggagtgtttcatgcaactctagctgtgaacagtttactcaacatggtgttacaggtaaaatatgtttgactcctaaggaatctttcttgtgaaaatttttttttgaggaggagggagcattcatttgtacttgggaaaactactgttttgtttgtttgtttgtttgtttgtttttttgagacggagtcttgctctgtcatccaggctggagtgcagtggtgtgatcttggctcattgtaacctctgcctcccgggttcaagcagttctcctgcctcagcctcctgagtagctgggattacaggcacccaccaccacactcagctaatttttgtatttttagtagagatgggatttcaccatgttgtcagggctggtctggaactcttgacttcaagtgatccatccaccttggcctcccaaagtgctgggattacaggcgtgagccactgcgcctggctgagaaaattacttttattctgttcttccattgatagaagtgtaattttattaagttactaatagaatagaaagcctatttgttgctgtcaaatcttacacctttcatttttaaaccccgttaagtttattcctagagaattcagtctaagggtgcatgagagtacctttgaaaagttaggaaatggctgtgagcattgataccatcactcaagtaagtgatggcttggaagaataatagcatttgatttaaattacagtttttggtaaattcaacagtctctttacttgctgtagtgttgagcgcctctgaaaataggaagctgaacgctccttaacggcacgtatctggttgtgcacagccccatgtggtcccatccattctggggtgtgctgtctgctgtgtttggtttgtgctcaacttccctgtttgagattcttttttaagttttatttttaaagtctttaatttttaaaaatacttcaatagcttttggggggggggtaagtggtttttggtgacgtagatgcattatatagtgaattctgagatgttagtgctgctgtcacccaagcagtgtatgttgtacccaaagtgtagttttttaatccctgtttggcatccttttgtctggagggctcaataatctgtatttttgtcatctcctgttttcctattccttgtagctccccaccccgttggtttgatttgagtgatggattattccttatatttctatcctttataaaatttaagctttttagattccaaagattccaggcttgattttggaaactcggggttttaaataatctgaaagatgtcaatcaatagtggcatcatgggcgacttgtcattcttcctcttggaagtccttcaatgagtagattttagaagtgggtagagttagtgtcaccatttgctaaacttacctgtgcacctagtgtgctgaagtaaatgttccttacaatgtggaaacgcttgaggaacactgtggggtgattgtctttccaatcaattttaatttctgtttattaattagagcttgaaaaatgcctgcttatcctgtcttgattaccttctagatatcatttctttccgggaatactgatcttgttttaagcactatagaatgaattagaaacatttttatttgcagaggattcaacggtaataaataattggcatattatctctgttattgattggcagcagtgttgaaatttagccattagcatgttcagtgacagaatggaggcagatgttgttatttcggaggttttcaagcacaaaattatgtttagttgatttgaatacttggtttcgtggggtctggaggggactgaattacataacccactgctgtttgtatttttaaaaacgaaggcatgagatcttaccctttggggtcttgatttcaaagcctttggatatggtattcctagctgttctagggacgtggggggagctagatgtaggccttggtactaaagtgtgaccaatggttgaaatggggtagaccgaagtctgtcatttggctacgttatttcgtcttcctgtttaaaaaggtgaaaagagggaatgtcacagcagctattcctgtgttagaaatctagacgtcactgatttccagagacagcagagtttatgattgggcgttagaaggcctgtcctggcttctgtgctttggtcagtatttgctgccttttgtgcagggtatcagtcggtcttacctaactgttcactaaggactcgactctgagctttgtggcctgggcaagttgcacactcagggcagacccctgactgcgctttgcccttttccctgtaccctgattgggagaagattcctgcctcggagtgcaaccccaacaggaatgcaggtcctgtgaaggcagtaattctcgtctgtctggctgctgctgtgtcctggcaggtgtgccctggaagcatcccgtgagtgctggctgcggaaacccagatggtggttgctgtcccacagcccttgattcagagatgccctggaccacagctgcctggagtgtagagcagaggcttactccccacacccctcctgctgtgcgacctgcggcccagcctgctgttggaggcttgccatgtggatccgaaggacctgcgtcttggctttacaaagattctccactcctgggagccctgactagcaaacgtctgtgtagtgttgatgccacactgcagttgttaacatcgcgtccttttctgccctgttaggttggtttctctcttaaacagggcagcgctgtcatcccattcccccgcctggtccttcctcttccccctagctggttactgaactgactgccattcaggcactgatgggaaatcacttccagaacttgcaaaaccatagagaccggaggttttctgaaggaggctttggtgctgaaacattgctgctgaaacattgttgcagaaatgtggggtggagcctccttcctgcccgtctcacccaggggatgtggtttgcttcccgtgtggtcagcgctgtgctgcgagctctgagaggtgaccttttcctctgccttcccacagctgccctgagttggcaaaaagtgctttgcccaaggacagggtctaattgataatggcgtgtgggggagatgtggctcctgaggcctggagcatgcattcattcattcctttatattattttatattttacttaacttttggaccagttctctctctctaacccaggctggagtacagtggtgcagtcacagctctctgtagccttcaactcctgggctcaagcattcctcccacctcagcccctaagcagttgggactacaggtgtgcgacacaacgcctggctaactttttgtatttttagtggagacagggttttgccgtgttgcccaggctggtcttgaactcttgggctcgagcgcatcactcactttggcctcccagagtgctgggatcacagacatgagcccccactcccagcccagagcattttacaccagatgtcaggacattgctggtaggaacagcagttggagcagaagctcggggtgtggtcatcagggaactgtggagtttgcagcctgcgtgagacacgtttcgtacacacatttctgccaaattgagaactttgctgctcgtcagctctaagccaagtaacctcttacccaaaacttccagggatgctttacataatgccaggcctctgagaaagtcagctgcagaacttgaacgagaaagtgctgttttccacgagtcttttcagccgtatctttccgtgtccatgggtcagtggtccctgcacagatgaattggcactggacacggcctcctgcggtggctgctgggggctgagccttccctgccagtccctgccaagcaggaaagacaagtttccctcagttggggtctgtgcccagcatgagtggtctatctagtgagtggctgggcacagttgtccccatccatggcggatgcctggtggcagcacccactgggtctcagcccaagtcttccgtggatcctggcaaaatattgatgtccttttccacataatatttaaggtatttgtgtagagtcttatgtacttgcaggagcagttggttaaattaggtacctagaagttgagtaattggcttgagaaacgtgtgcattgaaaatcggtaagttaccaggcgcagtggctcatgcctgtaatcccagtgctctgggaggctgaggtgggttgattgctttgagcccaggagttcaagaccagcctgggcaacatggtcaaaccacgtctctacaaaaaatatgaaaattagctgggcttggtggcgtgcgcttgtagtcccagatactcaggaggctgaggtggaaggatcacttgagtcagggatatgaggctgcagtgagccgtgatcgagccactgcactccaacctgggcaacaaggagaccctgtctcaaaaaaaaaaaaaaaaaaggatagtcataaatgatttcttagaaggagtcttctcctatcaacaacggattggggtctgtgtcctcacgcttgctagtactgtctgtcaacagtttctaaaatttgcgtcttggctatccagggcaagcatcttgtgtcacctgcgtgtgcctctttttctgtggacttactctcttgattttataggagccctttacatgctagttgattagtctttagcctgctgtgttgaaagtgggttttttttttttttttggtttttcttttgttcacgtgacttactgtgtggtagtcttaattatttacacagatgtgtgtgtgcgtgcgtgtgcctgttacagagctgccccatatttttattttgtaatcctgtgtgtgtttacttttatttatttggaaaggttgttgtgtgggaaacagccagctttgtcccagatttcttgcccgcgtttctgccggactctcgtcctgtctggtttcttgcaccctgtatggatggcagtgtgtgcatccggaagcgcagctcctttccagctcgtttctaggccagtcttcgtcgtgctttcaaatgaaaggtgcagtcagtgcgaggaacaccccatgtagatttgggagagcctttgacacccgagagccatgtggcagactaatttttttaacatcctgttttacggacagctgtaaagtgctgtcttaatatgtaggtgtgcacatttcctcattgtatcactacatgaagctgggaatgccgtctgtgtgtgttttctgttctaacttatggaaaaccaggaagtcggtacgccttacattgctttttatctcatcactttagtcttggtattctgattttattatatttatttttttgaggcagtgtcttgctgtgtcgcccaggctggatggagtgcagtggtgtgatcacggctgactgcaacccctgcctcctgggttcaagcgattctcctgcctcagcctcccgagtagctggaattacaggcgcctgccaccacccctggctaatttttttgtatttttagtagagacggagtttcactattttggtcaggctgatcccaaactcctgacctcgagttatcccgccctccttggcctcccaaagtgctgggattacaggtgtgagccactgcgcctcgcctattctgattttaaaaaagaattggaatatcatattttttacaattggaaaactctataaattttctaatttttacccttatttttcttattgatataagtatttttgtcttgttttccagcaggctgattttagtattttactgtgtgattatgtttctgagaaagattagttactgtgtttatgtcccaaaattcctctacatggcactgttgggttctcttgtaccttgattttactttgggttttagattctgtagagagggtgaagctcccggccctgtgatcttgaggagggtgagttgggagccgtccatgccctgcctaccccaacaccaggttcagctgcctgtgaagtcatttgtttcgtgcacatttcctagttactggtattttttaatcattaaaaatgtttttaaattattgatagtaattgtacgtatttgtagggtgcatgtgtgcagtgggtgatgatcagatcggggtgcatgtgtgcagtgggtgatgatcagattggggttaatggcagagccacctcacagttactgttttgtgttgggaacattcagagcctctcagaaaactttatttcctaagctggtttgttgaggggttttctttcatatcagtttgctaatttatgtgttcactggaagcatccacggtgttctgaggcctgtgatcatgcgcctttctcattctttacatttgtccgtgtctgaaggtttccaagtgttttcctgttggtttagtttctctcaaaagaatacctttctcatatcttattattatcctgagtttttcttcctattttggttagttgtgcttctgcagaatatttatttgcagtacttttgttcataaataggaatgttaagaattgtttttaagttcgacttgtaaaacatttttgttgacttctaagtcgttcttttaaatttctattttcattcaaaaataacccatatgacatctattttttggaaggaagggttaagaaacagcagatgttgccttgtcaattctgtgagcttgtattctactggatttttttctatcttgcttaagaaatgctgcccctgtgtatctaccttaaaaaatgtttaagtccaggcgtggtggctcacgcctgtattccagcactttgagtggctaagtgggtggatcgcttgagccctggaggtcgaggctacagtgagtcgtgatgacaccactgcactccagtctggtgatggagtgagaccctgtctcagaaaaaaaaaagttgaaaatatgaatccatctagaacatttgtgtgaagtggcctcactttttcctcctctatggacaatttgtccttcctccatgatgaattgtgatttaatttttaatgatttgcttgtctgcagcttttttgggaggaactttattgggatttgcccatcatgagtacatttgttaaggatgggtgcgatttccctcttgtgaagaagcaacacatcacaagagcagattttgtccccgcctctcagcggagcttagaaccatacagaaagtgggccagacgtggtggcttacgcctgtaattccagcactttgggaggctgagctgcgtggcgggtggattgcttgagcccagcctgggcaacgtggtgagactctgtctccacaaagaatagaaaatattagcctggcttgggggtgcacgcctctagtcccagctactcaggaggctaaggtgcgaggattgcttgagctggtggaggtcaaggctgcagtgagccaggattgcaccactcggcactccagcctgggcaacagagcaagaccctgtgcccgccgcgcccccccacctcccaaaaaaccccagaaagcagagagttagctgtttgtcttccccatccggtattaccagggctggaagcatacttgagagcactacgtttaatgggcagcattttgggagggggctgggggggggttggtgctgggcacatctggccacttaatgtagttaaagcaatagcaactgaatgaaaagctctaacatgaattcatcgtttcatctgttatctgacttttaacattaacatatctagttctgcttttgtctgtcttttaaagagaattgcatgggcagcttctctgtttttcctgcgtatgcaggagcttagctttgggctcctgagctcaggccttctcagctctgatgagcttcaggagaggcagttggaggttgaatctgggtggtgtatgccttcttatggaagtccctgatgggaagacagaggagctctgagaagaaactagaatgacttgtcattacatttttatgtggaataagattcagatgtctttagaaaaataaaattttgtgaatatgcgagtctgcaaaagttacaacattcattctacgttttttcttttcttttttttttttttttttgagacggagtcatgctctgtcgcccaggctggagtacagtggggcgatctcggctcactgcaacctctgcctccctagtagctgggattacaggcctgtgccaccacacccggctaattctttttatattttcagtagagacagagtttcactctgttggccaggctggtcttgaactcctgacctcaagtgatccacctgccttggcctcccaaagtgctgggattacaggcttgagcctgtaatttttttttttttttttggagacgtagtcttactctgtcacccaggctggagtgcagtgaagtgaactcggctcactgcaacctccgtctcctgggttcaagcgattctcatgcctcagcctcctgaatagctaggactactggtgtgtgccaccacgcccagctaatattttgcatttttaggagagacagagtttcactatgttgcccaggctggtctcaaaaccctgacctcaggcaatctgcccgcttcagcctcccaaagtgctgggattacatgcgtgagccactgtgcctggccccatgttccttttcaagatttaatgattaagtgggcaacagttaaatccctccagcgcctcagcctaaccagggagcggggcagtctcagggcgacgtgtttcttgaggacgcttagatgcctagggttccgtttataaagagttccttcaataaaaatcacacttagactttatgtagtgggcagttagaaacagggaactaaagacttttcctttctctgcctccagcaaagcccaggcaccccacccagcaccatgctgtcagccgtggggacaggcagcccaaggctgcagggagagggccccaggaggcctggccctgtgggttgaggctgcagtgcgccctgggccccctcctctgctctcagtgtgagagtccactctctctgctgccctctggggtactctgtggaccgcagctgtgtccatactaaaacatgaccaaaggctgtaatttccggctttcatagccctttgtcagggtatcgtatattgtgagttcctgggaaatgggcacaaatcaaagggacccagttcggggcagggaggccacagcgtatcccccgagactgaggaacttcagacagttcaagtctaaggggtttttcaggcataaacatccaccgcccgcctccttttctacatgggaaggccgacgccacagtgtgctttagttggtttccatctgaaaggggtcctgaacctgccacgggacgtgatgccagtggtagctgaatgtgcctcactccaggtcctcctggaattatcctcaccactcggctgagggatgctgtccacacccctctcaccgatgtggacgtgtgcacgcggtgtgtgtgcagaatccaggctatcaggatgctgtgccgtggctgcccctgcgaggcccgtgtgaagccagccccgtgcgtctgtagctaccccttgaggagtaacccgagcggcgtgcttcctgggaagttgctaagctgcgctgaggtggtaacaacagcatgtggcctccacctcacgtaagcatttggtgtctccttgaacctctgttgtgcaccagcacctaggagacactgaagagccagacccagtcacggccgcccagccagggagagggggtgcgggtgaatggtgtcctgcaggtgctgggccggaacctctgtgtcgctgcggtggtgtgttcagctctgacatgagtggggatgccaaccccagcagggcttctgggaatcttttggccttttgttggcggggtttcgtgagcctcttatgctgggaggaatccaacaggagactttcctcctcattgtcctcagccttcgcccgtgctccgatttcctcctgtgtccccatgtgtgctccagtgccaccatccctctcccagctgggccctgggcacgtccccgtgccgtcagccagtgcgctcttggagcagttatttccaaaccgaccttcacgtcttcattccctggagccacctcttcataagtagccatgaagagttaattgtggcacctgttctccctctcgacctctgcccttcatccttctcaattcagcttctatgtcacgagcccatcacgtggctggcaaaagcaagtcactgtcctgtttaaaactgttcaggagtctgggcgtggtggcccacgcctgtaatcccagctactcggaaggctgaggcagaattacttgaaccgggaggcagagtttgcagtgagctgagatggcgccactgcactccagtctgggcagcagagcgagactcttgtctcaaaacaaacaaaaacttgttcagccttcgtacctgctctgccctgtgtttgaagccgggttcctagcgtttccccagcagatggcgtctgccattccagggctgttcgatgtgcctttgtatctgcagagtgcagacagacagcactgccttgccacattgtttggagtctgtccacccttgagctccctaggagtgagggcagggtcttgctgggtgtccccagtgcctggcacacattaaatgtttgaatgagcccatcttctgatgggccaggcatgcatttttggttgtttgaataatctgcagtgtgtgagtggtattcctaatttgtgtaagtagcgactaacccccctctctccccaaaaaaagtcaaagaaaggagcagtctccccaggggcctcgtggattgtgtgtatttgggaaaagcgtgtttttatctgcaggagtttgttttcatctgcgtgttatcagccaggctcctgcactccattcagactccatttggggaagaaactggagcctctgataagatggccatgcccgcgcggcagctgcggaacattcctctaatagcttctcgatgatttcagtgtgtttttggcttgaggggggggatgctggcagatcttgtttctgtttttaaattttatttaactgtggttacaaaacaggatgttttctggtatatttagttcccccaataaaaagaaacttgatctgttgtaaccagcctacattttagtaatttataaggtttaatatttaattcacacacaggaagaagcagaaattatacccaaacagtaaattatctatgggctgtagaattagaagtgacttgttttttctacaactaatgtgtattgccttttccgtacaaattgctaaactaaaattgtttaaacaattagtggtaaatttccaaagaagagtaattaatggtattacatggaaagttttaaaaggctatatagaaagattttagaaaatggttggctttcagaaagtggtgttggctctcagagggtgaggctgaacggcagtgaatgcccttttttggttttaatttggggaattttaggttaatttgtgagaagttgagttgttttcttaaggatgtttgtagaagttccgctgacaagtttgttgggggctcttcgtgtgagatcttgcacgagtcaggctgcttgactggaaggttctcagcagcttttgcaggtcgggtccctgtggccccccgccatcccctgccttgtctggtgatgctcatgcctagaagggaggtctttcgcctcctgatgagtaggtgccaggaaagtggccctgcccctgcttggtgctaaagaacagccctgaccgcatcaggacattttggccagtggtggtccacgtagaccgcaggggttgcgtaaggttaggacggcattttcactgcatgtgatccaggtttgtatccttgccgttgacctacagctgcttgcagcgctcagtgctgggatggcggcacaggtttgcggcctagcagcagtcggccgggccctgcagcctgggtgtggagtgggccgtgccctctaggcctgagtgcggtgacatcacctaacatacccctgttgctaagctgcatgtgactatatatctatatatctctctctctatctgtattttttttttggagatggagtctcgccctgtcgcccaagctggagagcaatggcacagttgtggctcactgcaacgtccgcctcctgggttcaagcaattctcctgccttagcctctggagtagctgggattacaggtgcgcgccaccacccctggctaacttttgtatttttagtagagacggggtttcaccacgttggccaggctgatctcaaaatcctgacctcaggtgatctgcctgcctcagcctcccaaagtgcttggatgacagacgtgagccgccgcacccggcctgtattttgtcaggagaatatcagcatgagttaagtttatgatgcaggtgttcaaagtttttgtttagttggggaaagtgcagtattttgtaccacccagtaaagcctttgtaaagccaaaacatgaagtagatattgatcactaataaggtttaatacagttggttttgccttttttcggtttctttgtgagctgcagtaacgggaaagcaagttctagggaagtgtgagcatgaggtgctgggatgcctgggtccccgcgcctttgtgtatgtgctcgcgtctagggagttctgaacatgggggatgcccgggtccccgcgccttcgtgtacgcacttgtacgtagggaggtctgagcatgggggatgcctgggtccccgcgccttcatggacacgctcgtgtgtggtgtgccgtgatgcttgctgtgcagcaggccggctggtggagagctttcgctggcaccgagctcttctccttggtgtggccgtcggctccatcctggtcatccttccctggtaggtgttactctaaagctgggtcctaaacctggcaggagcttctaatgagaaggggcacttgatcctcgggtgggctgtgtttacgttcttggctctggaattacctttgtcttgcggtctccgccgctggtggtctatgtctcatcaccaggctcaccgccggggctcttgcgtccgcctggcacgtgtcagctgtgggtccgggatgaagcccgggtggaagtcgagggtgttgatgaggcacacaggtcatgaggcggggcaggaactgtgggtgggcgagacgtgagtgggtcatggaaggatctttctggaagtgagttggtcgctgaatcctgcagaggggcctggcacaaaggtgtggaaggcaggtgtgctggagtccccaccctggccagcccttggcttgtttctgtgtgtggctgtgaccccggactctggatttctaggaagctgaaaaggtttgatgacctctttctgtcttaaaaggggaggtgaggtaaaaccactcctgagagggacttacccgctgtggtccctgctttgccgaagccccgggttttgatggtgccggcagctgtcggcctcctcgcctctgatttctctggcccaccacgagcccctcacctcctgcagggcttactgtgacctgggctcctcctcctgtatcaaaggattgctggcagtcagagctcttcagtcgtgtacatgatttatataatttatatttcttttttctttttttttgagaaggagtctcactctgttgcctagcctggagtgcgatggcgccatcttggttcaccgctacctccacctcctgggttcaagcaactctgcctcagcctcccgagtagctgggattacaggcacgcgccaccacaccccgctaattttgtatttttagtagagacggggtttctccatgttaggctggtcttgaactcctgacctcaggtgatctgcctgcctcggcctcccaaagtgctggcattacaggcatgagccaccgtgcttgaccaacctaatttatacttcttaaggaatggaaagagcacagagacctgttcatatggtggatgtagcagtttttaaaagcgaatgtagatttgaagtcatgacatctgtgtgtgagtttttggggacatggttcagcttgtaacaggggaagtaaatcaggtgtaaaaatgtgtcaaggtgggtggaactaaggggagagagctgtgacgtgaagcattacgcaataaagaggttcccgcctattagatagaaacagaggtgggaacaggaccgaggcggtgtgagtgtgccctgacctctgcagcagcggccctcctgccgccgtctccacgcgcccttcccagacctgttcagtttcccagcagcgggctggcgcctgccttctctctgttgcagaggccggctcttcctggatgtgggccctctcaggatggttgcaagcctggagcccacaggctgcttatcttagcagaaggccttgagggctccttcccctgcggtcgctgtgacggagggagcgtgtctgctctctgtggcttcggttcttcaggctgctgttgtgttgagagtggcttctgccgcactccgcattgataactgggtttcatcctcgttgtattttcttattttttatagagatggggtctccctatgttgcccaggctggtctcgaactcctgggcccacgtgatcctccctgcttggcctcccagagtgtggggatcccaggcggggtccaccctggccttgtcctcattttaaagacgaggggactgtggaagcacagggaaggcgcctcttcttccctgagctgcaccccttccacaggcacccatgctgcccgtgcagtggcgggtgcagcacagtcccactgctgagcggcttggcctgcagcgaggccccctcccacctgccatgctctcttgctggccgtggggcgggcgtggggtgacagggttgcctgtggtggccacagggccatgtgtgctttgagtctggcgccgtcatgctatgcatggtgtccatctccattcagagacaaacacctcccaggctggccagaccactcacaccacttccacctccgtaggcctgagggagccgggtcccaggggagggctgtgggagtggcaggagaagtagcgatgtgtcttggggacgtaggccccagtcatcccaggggcctacggtgcatgggtggtcccaatttaaaacaaataaggaatatggggcctgtggtttcttatttaaagtaagccactctttggcccctgcacttttccagggcagggtaaaccggaacgttgttagaattgggaacagtcatcaccgtgggccacggagaaagtccacggaaccccactttctccatcagccttctggtctgccttcgtactgtgaaccaggagtatctgagaccgtctcagtcagtgtagaaagtttattttgccgaggttgaggacacgcccgtgacacagcctcaggaggccctgacgacaggtgcccgaggtggtcggggcgcggcttggttttatgcatctcagggagacatgaggcgtccctacacgcaagatgtacgttccggaaaggtgggacagctggacgtggggtcgggggcttccgggtcataggtggataagacgaatcattgcattctatgagtctctgatcagcctttcactgaatacacaatccacatatgagagggggtaggggaagggccacgtgtgccttagtctggctcagtgagacaacagggcagaggaagcagtcagatatgcgtttgtttcgggggagcagagggatgactttgagttctgtcctttgtctgcacctgtgaagataagctgtccactgacattgccagggtgaaaacccaacaactgctctagggtaaagatcttgagccccacggggaatttccttgtgcacaaattgtgagggaggtgtgtggcttttttgtttgttttttttgagacattgtctcattcctgctgcccaagctggagtccagtggtgcagtctcagctcgcagcaacctttgcctcctgagctcacgtaaagcgatcctcccagctcagcctcctgagtagctgggaccacaggtgtgcacccctgtgccctgctgtagccaccttctttaggaataaaatgggaggcaggtgtgcccgatgcagttcccagcttgctctctccctttagctgagtgattttggggtcctgagattcattgtcgtttcacaataccttgtttcccaaattagcaaccaaagagagcggttatacttgccctggggctttagggggaagcgcagcccaccctgtgtggactcgcagcggaagcagaggctgctccagagactgcggtgccttcctgtccaccctgacccaggagcctcagtgttgagtgaggggcactggctgtttcttgagggtgggaaggaacaccttttcagcctactgtgcagggtttttttttaaggcaggatttctgttacccaggcaggagtgcagtggtgcgatcacagctcactgcagcctcgaactcctaggctcaagccgtcctcccagctcagccccctgagtagcttagactacaggcatgcaccactaggcctggctaattttttctttttttttgtagagatggggtctcactatgttgcccaggctggtctcaaactcttgggcccaagtgatctttagcctccactttagcctcccaaagtgctgggatgacaggtgtgagctgccactttcagccctactgtgcagttttttttttctttttctttttttgagacaaagtcttaatctgtcagttaggctggagtgcagtggtgcgatcacagctcactgcagccttgaaccccctcggctcaagtaattctcccacctcagcctccagagcggctgggactgtaggcgtgcaacagcgcactgggctaatttttgtctttttttttttttttttttgatagagatggggtctgtcttttttcttttcttttttttttttggtaaggagtctcgctctgttgcccagcctggagtgcagtggtgcaatcttggctcactgcaacctctgcctcccaggctcaagcgattcttatgcttgagcctcccgagtaactgggactacaggcacacgccaccacacccgactaatttttgtatttttagtagagacggggtcatgttgcccaggctggtctcaaactcctgacctcaagtgatccgcctgcctcagcctctcaaagtgctgggattataggcgtgagccaccgtgcctggcccagatggggtctttctgtgttacccaagctgatctcaaagctaagctggtctcaaactcctgggcttaagtgatcctcctgcctcagcctcccaaagtgctgggatgacaggtgtgagccactgtgccagcctgtgcagtgtttttaaaaggattggtgtaacagtaacttgtgtgaacacattgatgtggtctgggcccttccccgcatgaaaggactgatggaatcctcagaactgcaggcatgttgagcgccagaagcagggtccttgggtcactgacaggccggccttggtgaacacgtgctgcagaacactacctccaggtcctcccacatgtgggacgcggcgatggcagagataagaaggtgatgtggcaggaaaattctgaatcatacaaggacgtgttgtgcaatagctgcgtgagctctagcaggatgttcgagagaatgtcctgggggctctttgccatgggagagggtgttgctgtgggaagtgtgctgagttgtgtgttcctcggccctctgtgtggcgcctgcttccaggctgtgcgtgaggctggcttgttccgtcctgggatgctggcaggagtgtgggtctgtgcattcccatatcttgtgaggcatgttctcagcatcagcagccccagctccttcctcctcgtggtgactgggaggcgaatgggccagggtgctgggtttccaagaacacctgccttgctctctgtggggatccacagagagttcacgcagtggccctgtcagccctgaacatggagagccactgcatgtgaggccttgggggcatgtctggagagcctgtcatggcgtggagctcaccgtacagtctcctgggaccttgacagaccgcaccaggccacatcctgcgccaattaaacccgaacctcagggctgatcccgttgtggccaggaggaagaatggataatgctgggcctgggagggaccgggaggccgagtccgaggcgagagccatggggtggtgcttgttccggttctcctgcagccggtctgtccatcctgcctgctgtgactgttctccagccactttctctttttcatttttcttgctggaaagctgtagaaggcagtggggtgggaacgctccatccacagtgcaggttagaaccttggaggtgatggcttcgcctggcagtgaggtgaacagagcctccagcagtgccgggcgtgtagccagggcagctgcagcaggaggacgcccagagccttggctctgaacagatagaaccatcgaggccgaatcgggcagtcctcctgttcagaccaactgtgtgtcccttttgtgagacagctggtgacccctgctggcacatctgtgtcccagccgtgaggcggccgctccctgtccatgccggcagtgcaccgtgcccacgggaagctcggtgtgggggtttggagcagcagcacgctgcgtgactccccaggtgatgccagggagatctggataaggaggtccacatctccaccttcatcttctttcctcaagtcacttttcctggcacctcactaaccatgaggtttcacaggaaccttggggagtcccttgtgtgcttggcctggggacacaggactgtgtcggactgctggggccagaagggtttttctagagaccagacccaagcagctgctgtccacctgccacgtgtgccagccccagccttcctcccaagtgagtgggggagggaggcttctgggtgttgccgggacctggccgggggcggagtggctgagctgtgcaggagaggatggggcgcaggcatccacaggagccaggctgccctgtggatgtggccgtggagcctgcacctttctcccccagtcactccagggcttctctgagcccgcagccggccagctcagcggcccggggttggaaggaacgcaacatccatgcctgcctggcggtctcagcctctgaggagacgacacagggagctttggacgctgcaggtgtcttcaatattcattttcaaaatatcagtcttaagtctcagcggggcctttttctaaacagacggtaaatgcaaaacctcccccagagcagctctgaaggcagcgcgtttctcttcctccgtggtgggaggaggctgggctttgagggcgggaagccctggtcgaggctggacccgcagcctggccctccccaggcgatggcagccccggctgacccacagcgctctgaagacaggtcctcggacacccgcccaggggcgcgttttcacctgcggagcaggggtgcggggaacagctgggaggtggggggggtcccaaccgcagctgagctggaagtgcagaatttcaactggcagcgagactgggcttcccagagccaggatgagccaggatgtgtggggttaccctgcccccattttccctccgcgtggagtggggcgagtgagcggctcacgcttggctctgaagctccctgggcacggggggctgtgactgggccaggcaggggcggctcttctggcggcagtgacagagctcacgctgcatcgctgtgccccggggaagacttcacagctatggatatttagggtccagttcagtgtgtcacacaccagaaactttaaatttttttctcaaatgttctactttagttggcaaagtataattcttaaaagtcatggcggagtattgggtgcaatcctcctggaggcaggaacgggcttagcaccggcaggttctggttggccctttgctgctgtgtgcgtgggtcccttcgtctctcctctctccctccaaggtgggatgtggtaccctgggagcacctgtgctgagtctctccttggtgtccaaggggctgggatggcccagggtgcacaggtgtccccgggcagcctgcagatgcttctcgacgacacggcccctttgagttcgaaggtcagatctggaagccacgttgccacacaacagcgacttcgcagcactgtcgccatgtgtcccgctctcttgccagggtccaggcagctgggaaacagcttggtttgctgagaagccacgtcctgggtgtccctgtcccagagccctcctcgctcccagcctgcaactggggcctggtcgggcgccctggcatgtttcctcctgctgcaggcgtgctcaggaagtgctgtgtgtgcatggcgcccgcgggcatggcctgtgtgctgggtgctgttttacttcactcacgtcatagaatcgcagacagcagccctgccacctgtttgttctgcaggtgagcacgtggagttcccaaggggagaactggccccgggctaggtgacccctctcagctcaacagttccatgtgatgctgagagatgtgcgtgcattctcctggtgcagccatctcagcaggggtcctggggtcccctggcaggacgcgcgggccgggtgttgacaatggggtgtcataggtcaagcctcacagcctgcgtttacggtgcttggttaaatggtccccaaaatcacgtttctgtgttcaaagtgtggggaaataggattggggtagaaggtgacatctgaggcctgcgcctcctcttgggtttgctgaattccagaaacgatggagccctgtgggcgccgtgctgtggctttaggattttgtgaggcttgccctcccctctggggacacacaggctccaggctgcgagttgcccaggtcttggtgttcattggagatgaatttctgcacttgtgtgggggtcttccttaggccagcatcaccatcgtggtctccaaagaccagagcctggcctgaggggacagcctgagagcaggttccttcctgacctcggagcccgttctctctgttgtggttgagccacatttgagctcctgggggcaggccctgggcctggcactcagcactggaagtggtgtataggccagtttaattggagaagctcctgaatgtctgtcggtctgtcagtccgttgggtttcagatgcatttcaatggctgagtgctcctcagtgcttgcggggaagcgaggaggatggggccgcccctggcgtaaactctctgctgtgccacgggaggggtctgccttgctttacatctgcgcagggctcggggcccgaagtgctgggtgcgacagtcgttttaggcacattttagagtttgcggagggacgaggaatcccaccacctgcggcctcgcacacttgctcctggagctctgacgcagctgcctccctcacatccacgcagtgattgccactcaaactttgagaatcacagtggagaacattctgtgaatattgttttcttgtttttattcctcagcgttcaaaacattttttccatatttcttttttttaatgcatggccttccaatgactttttctgtatttcaaagattaataaaagcacaacttttcagagcgttgagaagccggcccgtcttgggtgtgtgtgttgtgcggggccagagctggagctgcactggagtggccgggatggccctgccttgggcggggctgtggctcccgtgggcgccgccgctgctgccacagatttattccagcacgaggcggagaggggatgtcttccgtgtatggactcaggaggaaatcgccaactggacccagaacctttcttccccagggtggctcagctggctggttttgacagcgaacttgtcagccctgaccgtgatttcagtggggcacactcactctcggaagaggcgtgttgactgtgccaaagctggtggggcggggagccgcttcttccaggagagagagaggggtgattttctgatgactcacttttttcccactcttggaggattaagttctggccccagtggcgccactgaagaaaggagataacctctttctcctgcccggagatggcgcgtctggattcagggagatcgtgcggccagcttccctccctctgctctggatgggggccggccgccgccgctcactcacggctctctctctcccgctgtgcctgcaggtgtggccgacgacgatgccctcgctgaggagcgcatgcggagaggccagaacgccctgccagcccagcctgccggcctccgcccgccgaagccgccccggcctgcctcgctgctgagacacgcgcctcactgtctctctgaggaggagggcgagcaggaccgacctcgggcacccgggccctgggaccccctcgcgtccgcagcaggtgtgcaaagggaggcagccgtggagcaggcgcagagtgagacttctctgggtgccagaggacagcgaggacacaaaccgcgcctgggctgctgtgttctgacctgagcgggcgtgggcggtcgggcggggcgggaggaggtagcctcgctctgctcctctcccgctcgcggcgccccacgccacggtggctccgggccccccaccgttaaaacggggtccgcgtgtcctgtacgcagcgtgttgctccgcaaaggatgacagagctgccacggcagtgcgaggtgctgcttttaccgtagacgtgccttttcgtagctttcagcgtagagcttgaggcctgtggcttaggccgggtggtctcgtgctggtggggtctgcgtttgcccctgcccctccgtcagcttcaccttctcgtgccttcttctgcgctgggtgcagaacaaaagaccccctcaagtcaagcctccttgtgaagcgtagtctgcccgcccaccccccgtggggttcttggccgccctgccctcctcccacctgttagggagccggatagtctctgaagtgagtgccccggagaagttctgggtcaccctgaggacgtgctgtgcatgtaggcttggccctgactgcgtcctaaagcccagggtccatgtagtgtgaatcgtgcgtcagttggaagtatttgtgcctcttctggttcttatcaccgcacgcggtgaggtgaccccagccgctcatgtcgtgcaggaagacatggatggttgatccctgggtttgggggaccgaagcggatgtcgtgaggttacttctgtggacttgggccgaacagcactgtctaagcaggacatgaaaagaagggggaagcgtctctccttttcccttcatggaactttccattgaaaaattagccccttccagtccttctcggatgaagcacagttgccggttacgcttccgaggaggacggaaggtgcacccccagccgtgagagcctcaggatgtgccgcctgtgggtgggcacggcagcccctccagccggccgcccacctgccgtgctgcgctcacctttgctgtgtgagtctgtgctgtgtcactgagtgacagacagaggcagttgcaggctgcatgcacccagaaagaactccccctgcactaagcgggcatgggggaggctccccagggtccctgcactgagcggggtgggggaggctccccacggttccctgcactgagcggggtgggggagactccccacggttccctgcactgagcgggcgtggggaaggttcccaggatccctgcactgagcggggtgggggagactccccacggttccctgcactgagcgggcgtggggaaggttcccaggatccctgcactgagcgggcgtggggaaggttcccaggatccctgcactgagcgggcgtaggggaggctccccaggatccctgcactgagcgggcgttggggaggctccccagggtctgttgtgcgctcctggtactggagggtctgatggccgtagggagggtgcactgtttgtcgatgggtctttgcaaggtgcaggatagagcagggttgtagctgtagtgtccctgaaccactggggttaggaggccaccggaagcctggcctgctaggggccttgtgatttcgcaggccccgagaacgtggtgtgcaggtgcgggccgcctgggggagccatgtttaaagtgcggtgaggctcctggaacggcacccaccgcaggcccgaggccacacctgtatgtcagaactgggcgggtcttctcctcccaggccttcagcgcctgtggctatggctgtgggcgggactgatacgggcaggcaggcgctgttctccccacgtattctcggcttccccgccatacaccgtttctgagtggggagaactggttgactgctgaatcccaacacaaatccttagagcaaagaggccagtgatggcttttgtttctgcccggatcctctttgtggatcttccgttttgcggcttttcctctcatttgtttcctttttttaatcgcttcatgagatcttgaagataccaaagtaaccatcaaagatttaaagacgtgatttttatacaaatatataacgaacacgtcagagacttttacttaagttcttactgagagatgacaaagctgactcaaaggatgagtcaagaaaccgctgcagagttggagacagaactggagtgaaattgcaaagcagggtggttttggtctctgcagaggccatttgcgactcactcaccaactccggtgtcagggtgctggtgggtgacagggaagaggttgagcaagcctccgcccctgcaggctcgctcattatacaatgagcacctgcaccaccaaatccgaacaactgtacatgcttacagagaagggcacgtgctagtgtgggagtgacaaagtcacacgggtgcagaccccttagctccagcctgctgggtgttctgacgaatggactttgtagcgataacacaggctcctgagtcaggatactggtttgctgcatttctgcgtcactgaaggtctcgctttccccgaagccccttgtcacagaaaacccatgactcttggccaggcctctgggtgcctggaagatcccactatcatctttttgtgggatttgcatgtcctggtcaaggttcctgtaaaaggaatacagtgaggagaccggccacccgacagtattgatggcccccactttggcctccagccgtctgacccgtccctgaatcgagcaggtcctgtcggagctcccaggagtgagcgagcttccactcacagggtcacagccaggtgtgcagcccccaggcctgggcggttctagggcatgattttttttaggctggaaatgagctctcacttgagatgcacccctcaaaatactgaacgtactgcttctgtgagaatttcccctccttgtgtctggtgtgattgacaacgggtgcagccagtggaagcaggaatgtcggggagcgcggggtgcagggggtgccctgtcacagtcagcggggagcgcctgtccctgctgcgtggtgtggggttcccgtggctggcatttgctgctgtgtggagtcctcaaacccagcgctcgccctgcctgcgttcagaggacagaggcaccaccgggaacccaccggatcctcactcaggctttggaaaggccgagtgatgttttgtgtttgtgaattccacacatactgtaggagtatcaagaacacgtaactgttaaaaaaggaaaagtaaaattactgaacaggaaagaaagaataaagcaggtcctttgtttttttggctgaggaaagcagcctgccctggaacgctgtagaatgtctccctttttgtgaagcacagcatggagctctcggaactgaagatgggaatctaaccctgccctcagctttcaacagctcgaagtttgtctttttaatgaaactaatttgtgtatttatacttaagggttttcaagtccttaaacttgataagaaaacttaagtcgttttctatcaggacaagtttttaagtagtcactggtgggagagcgtgcctctgtggactgtgcccaaggctggcggtcccacgaagtcccagagcccgcgagccggtgcccaaggccatgtctgtgatttgcaggaggttcaggtgacaggaaggcctgctctgtttttctcacttcaattttggacttttttttttttttttttttttttgagacagtctcgctctgtcgcccaggctggagtgcagtggcgtgatctcggctcactgcaacctctgcctcaagggttccagcgattttcctgcctcacctccccagtggccggaactacaggtgcttgccaccacttctggctcatttttgtatttttagtagagatgtggtttctccatgttggactggctgctctcgaactcctgacctcaggtgatccccccgcttcagcctcccaaagtgctgggattacaggcgggagccaccgcgcccggcaatagtggaggcttgaagaacaccggaaagtggtttccttgtaccggacccgcccctcccccaccatcccggcagccccagggcgggtgagggcgactgcagtgtggtcacctcaggctttccgtccctagctcataaaggcccagtggcagcagttgctttaaaggagctccgttactccctttgttctggggtcttggtaaagtttgctttgctgaagcggaggaaccgcaggcggtgctgacccccccaccccgcccccatcccacggggtcccttgggtcccggggcacgaggctcctctgagggacacggcctccaagagctggctctgccctggccgccctccacagtcacggcggctccccgcatgctcctcgggacggagatctcctggcttcctcccgcttcctttcctctgcgttttccgcagagccgcctccctgctttggaagcaggtactcagcggcctctgcagccgccaacggcacacaggcctctctctgttcgttctttctttccgtaaccgtagcttgaggcacatttcctaaatatgcagcatggaacgcttggcggttctgaacgcgcatctcgtgctgctcctgtagggcggttaggacgcgctcctctggcgaggaaggtggcagcctccactgtgcacgggtcacaggcgagtgtggtgtggtgtggttgtgggtggggtgtggactggatctgcaggcttgtccctctctcgtggagagctgtcggggtccaggcagtgctcagtggtgagagccacagcacatttgaaagtccacatgtgtttgccccactgtggtccaggacatgtgtgagccacactcagtggacttgcacctgtgacatgttggtcagcgtggcggccgtcagctgggtgtggaatgcatctgattggagcctggcacccggcctaccatgattgtgattctctggggcgagtcctgagtgtgggcagggcctcaggcccccaagagggctgtgagcaggcaccttcctgtgaggcacgatgccaccatgtgaagttgtgtgggtctttggagagttctggcaggttgagggcctgtgcgtgtgggacccaggcctgccctgcctgctgccggccatgttccctctgcccagtcatgttgacaattgtggccaaattcaacatcgggcctgtttcctgcacccacgttggcacacactgagttcaagacagtttctgcagaaatgaatccagaggtgtttatttctggcacgttggatcagacgttcagagggtgggcgtctttctccatgcacttcagctggatcagtcagtgtcagccattgactttagcaacagggaaatgaaagactttcctcaataagaaatgggactttctcacgctggatggcacagagctggcaaacatgaggccagtccacaccaaggctttgcctgcagaaaggctgcactgtggccagcgggggaagcggaggagacacctgtggacaccctccccacaggtgggcacacctttgcgcaggcccagtgtgcgttctgaaggagagcccagggtggggttccgggactgaggtgcagccgtgtccagggtgggcttctagctctgccgctgggcggaactggggtaggtcccagggtggggttccaggactgaggtgcagccgtgcccagggtgggcttctagctctgccgctgggcagaactggggtagtcccagggtgggcttttagctctgccgctgggcggaactcgggtaggtgggagtcctcacttctctgcagggtggtgaagctctctgggtagtgtgagcagttctcaacgtgcaccttggaaagcgcccgttttgaggtttagctgtggccaagatagatgacttcattttgttgctttttgttcttaacatggggagatatttagaaaacatgtttggctcttgctggggaagcagtgctgttccgtacagtgttttacaagccgtgtttccttaggattgaaagaaggtggcaagaggaagaagcagaagcagagagaggagtcgaagaagaagaagtcgaccaaaggcaatcactagaccggacttgaggcacgcggtgcacccccagacgctggcgctccaccgtgctcggcatgcggtcgtgcacacgcgctaggtagcagcgtcggtcaggactgtctcgaggccacactcgctcggcaggattatgcgatcacggatcagtcagagcagggtcaggagacggggctgacggcacgggtggcggggacagacgtttgggacttggccgcgactctctgcttctctccagctctcaatctgctgcattttcctctagtgcttccggatcctcttcattcttttcggctactcaaccactccgcatgctgctggaatatttctggctttagaagtacaggagggcgcagatggctaactgagtaacattcatgaaatgaggctttctgtggcggcgtagtgtttggaattagaaggtaattcagtagagtgtaacttagagaatattgcaagtgacacattgaatcctgcccgtcagggcaccttttcctcagagcaatccggccacacgaatagaaggctgtcgtgaatcacatcagatgtaaaatcattccttctgtttactcttttaattttcatcctttgcaggtagtgcaaattcaacttcaaatatggtgtaggttttgctagattccatatttttttcttggatttttgctaattatttttagcaaaaaatttttgctcagtggcactctccctagtgtccatgggttagggccatgctggggaaaacgggccggtatttacacacgcgcaaaacacccagagacggcacaaggaggttgaactcatgtttcagttcgcgaacattgactccttacgaaagtcacttcattctaactagatgcgcccacttccggtcattatttcgtttgcatgatgtattgcttcttcacgttttgtttttattgagcacggagtagaattccagggctgccttgacttcttccctgcatgctccctcccagtgactttccttccctttcacatgaggatctgccgttcatgttgctttctcctttgtcctcttggacttgagggcattgtgaaaagctttgctgtgatttaaaaatgccagcaattttaatctagcagtgttgaagctgggaattttttggcgcaatccatgtagcagtgacccaggcttgggagccagaaacaagtgtgacctgggattttatttaacacaactgttgccaaagagttggctttgtttatttggttttggcggggagaggagtggtatttgatgctttctgtggacaatgtaaccctaaacacatcatgtattttaaatgccacctacataaataaaacataagcatattgaatacagctcgcctgctgtcctttgtaagcgccagtaagttgcaccgttaagactgactagaaataaaagcaattcttcaacattacgattacaaaggatgaaagtggtgttttgcaggcagaagccttgcttccgaaatgcgtcactgtaaggcgaaaacatgactttaaagctaacacccccggctgggcaaagtggctcacgcctgtaatcccagcactgtgggaggccaaggtgggcagatcacctgagatcaggagttcaagactagcctggccaacatggtgaaaccccatctctactaaaaatacaaaaaattagccgggtgtggtggcacacgcctacaatcccagctattcgggaggctgaggcacgagaatttcttgaacgagggaggcggagcttgcagtgagccaagatcgcaccactgcactctagccgggagacagaacgagactccgtctcaaaaaaaaaaggccgggcacggtggctcacgcctgtaatcccagcactttgggaggccgaggcgggtggatcacgaggtcaggagatccagaccatcctggctaacacggtgaaaccccgtctctactaaaaaatacaaaaaattagccgggcgtggtggcgggtgcctgtagtcccagctccttgggaggctgaggcaggagaatggcgtgaacccgggaggcagagctttcaatgagtccagattgcgtcacggcactctagagagagcgagactctatctcaaaacaacaacaacaacaaaaaagtaacaccccaacgcacagatgaggtggaaactcccgcagccttcacaggaggcattgagggtcccgagaggaaaacctcgtcgactcaccctggctctgctggcgaccaagactgggccagacacgcgctcagtgctgacatcctggcgtccggccttcctggtgacaggggaaggcggtgcagtaagtcgccttgcgggccggggtcgggggtgtttttaaaacaagattagtccttctcaactgctcagatcccagaatctgctgctgagattgtggcgagggaggcaggtggttcgacaggtttagaggtgactgttgtgccctcaaccctgcccacttgaccctcaggccgtcccaggagcgtggccgggctgcctcagcaggggcacagctagggagcgtggacagagccgcgagcgccttccagacaagccaggccacacacaagacaggctcttggcaaaggggccagagccccgtcttcacacggcctggctaccgagtcagctcatgtcacaggtgggtcctcccttcgctgagagggagagaccccgaccccaggaggagaagggagctggtgtccatggggcccggcaggtgcatggccagcaggtaggcatctgcttctcaggtgaggaggggtattggggtctacccgacccctgcgcccagcgccccatccccctagggcgggtccaggagctctgtgctgcagatagagcccgcggc

SEQ ID NO: 163 - DNA, 42609 bp, Homo sapiens
  source 1..42609: mol_type = genomic DNA
ccttggcattcttcctaatgcctccatgtctaaactgtgactactgcttccattcctcctctcacccctggaggcagggagaacccaagctacacaggctctctgaaaagagttgtcagagtgagtgccagttcaaatcggggaaagaggagggctgatcccagcccctgggtcaaggctcggggacagaagccagccccctccctttgccatgaggcacttgcctctccatgcccagcttggggcttgagccctttgtctgcttcatggtctttcagcatcaattaaacctgacagaaggactaccagcactctccatgctagggagtggcgcacagagccaggagctactggggctcagccttgttgctacagaactgcaggacagccagggcagtgaggggcctggaggcttatttttttttgaaatggagtctctgtcgcccaggctggagtgcggtggtgcaatcatggctcactgcagcctcagcctcctcctacctggaagcctgggtggggagcaagcccagggagggcggcagcagggctgtggtcagactaacatggtctaccatctgggacgctggggaacctgattaacccctctgttttctcatctatcaatggccacaacagtggcaccttcactagcttgttgggaagaataaatgagatagctcgtgaagtacctagaaggggaggaggcagggggcgtgcacttaccccagcgcccagcaagcagccagcaagtgtgagtcactacaagagtggccaggctgcctgctgcagacactagctttgtaccaggagcttgctgtgtgcccctcctcaccccccccatcctgtctctttgcagttatgaatactacgtcgatgaccctccccgcatagtcctggacaagctggaacgcaggggcttccgtgtgctgagcatgacgggggtgggccagacgctggtgtggtgtctgcacaaggagtgaccttctcatgctgatttgcagacggggcacccctgtggaggggctgctgtgggccctgacctccaagctcctgcctcaccgtctgccttgctcctctcttcccaaatcatcaccgccatgggcccagccccaaagggcagtgaatggccttctctgaaaccctgcgtcaagcagtgggagagggcagtgcccggtgccctggtgctcccagctgccctcctgcttcgggcctgggccgagggccttgtgtaggccatgttcctcgggcagctgccccgggccggagctgggcactccagcggccctggcgcgtggctcctgcatagctagcccaagccaataaagggctgtgatgagtggctgcgcctgtgctctgcttgtgcacggactctgggactctcaccctgcggagcgtttccctgggggtctgcccacttcctgggaggggcgccaggcctgggtggagcgctctgcggcagagcccagcaccttatacctatgtatgggatagaggtaaaatcttaaaaaaaaaaaaaatttattggtgacgttgaagaaaagggctgaggggtggatggctggagctggggctacgtaggcggcccctcctggtcttcctgctgcatccgtgcgatcagctgttgccgctcggccgcctggcgcatgcgcatcatgacgaggctctcgtagtccctctctgacagcactgagccctgtcggacagggcagggacagggaggggtcagggacagcagggcacagcctcacagactccgagtacggtgccgaggcagtgctgcgttctaagagtctcggagggaggacggcagaggaagggaaggaacccggagcatccttttggaatcctggctcgcctgtgtcccccagaacacgccacctttggcctccaggccggcttctacccagccagctccccctccctttccccaggccgcgtcagctccggtccatctgtttctcaggaatcacctgcgggccctctaagccaggccctcgtctcccttcatttcctctgggccctttacccttcacccctttccctctaccccgtagcttctgcctcttaggttcccaaggaagggaagttgtctgaggagcagggatgcacttggctctgctgggcactgaccctggcactctctatgcccggtgccctgtggtctggctcttgctgaggatgcagaagggagccctacccgaggcagcccggaatgccccaccctcgaaggggaaaaaggcaagcatgaggccagcgtgcctctaaaactacacaccagggctcctggagggcagggcccataatcaaaagaataataaacaaccatctgaatgggccaaggctgtagggtggagaagcagctctacagcgggacctaagctgccaacccacgccctgataaggtctgcggtgggaattaaaccttttcctccctcggtgccgcttaggctgtgtgatgatcatgtggtcccaacagcttctcagagaagtgtgaagcacacctgagttggcacagaagtgagctaggccagggattgcaagatgcggtggcctgcccgtagcagagagctgtggggccctgatccgcggtaccccgcatggggacgctgtcacagagcaaggcaggaggaaaatgtggtggtcagtgacccggggaataggaagggagcagctagggttgagatgccaggccctggccagcaggtttggagtaaggggtgtagagaaacaggaagtgttactcagcctgggttcccctgttcctcccgatggctgcacccctcccctctccccggctgcagcagtcccagctaggccggactgctaagcctggcccagagcacggctgacaattcacggcagcctccctggcccagcctcctgcaagagaaggaggaccccagaggaagcccggtagccagaggggaagggctggagcacagccaggtaggaggcaacacggcccggccttcagcagccgctctcctggcaggagccctctagggtaaaacaagggaggacaaggaaatagcagccaggctgatggcaggccaagaggaggccacatctcccatccccaggttaatgctgctctgccaagaaaacttggagccacccttggcgggcccccagcccaaccctgggcagcagagcccgcccatcacaggcatggcgctgctccccattaacacaccctctgccccccttcctgttcctgctcgtgagggcctgacagcggggctgagtcacccataccagctacaggtctcttccttccccaacaatcgttccacacgcctgcctttcaattaactcccacccgccccgaactcttcctacccagacactgtgggcagggagccaggcgcacctgctgggggcccagggtggtggggctgtgatcagaaaggaagccgcgtggtgacacataaagcagggctgcccccacacgagtccccagaggaatcttaagctccccattgccctggggtgttggtcccagctgccccatccctgcacgcggatgctgcaattacccaagagcacgaaacctggcttcccacctgactgagtcagctgagaacaaaaacacatctccaccgccacaaacagccaggccactcatcagagtccgggagccactggcagagagggcacggccccacactgccccagagacatataggagccaggcaaacaccagggcgagtgagctcgggccatctgctgcctgcctgtggaaggagcgctcgccagcctcacccagcccgagaaggtccacctctgcctccgccggagctgccctcattctggctccagtaagtgctgcttcttcctcctgggtttttttccactaccctattcagtaaccaggccactcctgtccctgtgggaaactcttgctgccaggaactcccagctgtctgctctcctgggcaaaaaagttccttcttcctgagccctcctctcaccatccaagatgtggtcaaaggtctgtgctgagtggaaaccctgaggcctctgctcctaggggagcctccccagctgctggcactcactgccccagcagggaccacatgcaccctggctgctcctgaacacctgtctgctggctcccctgggccccatggagacctggcggaaaggctccttccgcaacgcctccttcttcaagcagctgagcctggggcggccacggcggctccggcgacagagtagtgtgcttagccaggccagcacagcaggtggggaccacgaggagtacagcaaccgagaagtcatccgggagctacaagggaggccagatggccggcgcctgccactgtggggggacgagcagccccgggccaccctgctggccccacccaagcccccacgcctctaccgagagagctcaagctgccccaacatcctggagcccccacctgcctacacagcagcctactctgccaccctgccatcggcgctctctctgtcgagtgccctccaccagcactcagagaagggccttgtggacactccctgcttccagaggacacctaccccagacctcagtgatcccttcctctccttcaaagtggacctggggatttcacttcttgaggaagttctgcagatgctaagggagcagtttcctagcgagcccagcttctaaatggggtgagggtgggcaaagccggggtgactggaagatccagaggctggggattaaggaaaggacagggacaggactccaggcccatcgctggagggttcaggcaggcagagcttcttcatcctgggggaggattccaggataggaatccagggctctgcctgctctctgggtcctggacagtccttccaggcaccccagagtggagggacagaggcaatctggaaatgttgggggggcggcccttcctggcaggaccctgaagaaagctggctatgccgggaaagggaggctgtgccgggaaagggaggctctgtgcggcactacaggaaccaggtagaggctggcagagccagaaggtggcacggggtcagatcagggagtgggaggacacagactgagcagaagagatgagtgccccatgccagcctctttggaagccactgtcaacagagagaggtcacaggacaagcttgggtaaaggcagtccaacccaggcagaagaggaaagtgggaaggcccaggaagaaaggggagaaggcctgaccctgtctaatctggtggccactcactgcatgacactgaattgaaataaataaaattaacagttcagttcctcagctgcaccgttattccagattccacattccaaatgcccggtggccacacatgattaatggctaccacactggtcagtgcagaatggacgtaaacatcgctgcacaaagttctaatggacagcgctgtctagaccatggcctggagccaccagcaaaggggaggcgcatacaggggctggccacataggaagagataggtagagatagagtataactcaggaaaaagaccaggcaaatccttagcagaaatgaggacgtggctcagtctgccaacacagctacccggagcaatccctggtgaaggaaggcagctctagagaatgccagccacaggcacgcgcacggcttgcaaaggggtactttggggaattcccagaattactagtgatgggagccctggcaggtttccttcctcgaagagaggagaactggatccagggatgggcattcaacagcgaagcggcacagctggtttccagaaccgtctcccgggattagacagttctgccgcctgaaccctccgacgatgggcctgccaaccaggccaagcccactgggtcaaagccacaggctgtgctacggccccaccccatggcctcaccagaacacagaaaccagagcccagcagcactggctgggccatgtgttggtggccccccgggactcgctaagagtagcaaaggggagagggaagctctgacacacaccatttctacgacctaaatcagtggcctccctctttcctcctcttgtgtataggtaccgagctgtggatacaggagagaatgaataaaattctaacacaatctatggagtgttatctggggctgtgaaatgctgggacttgaaggtgggaatgaggtctctaaagcagggccctgagtcaggcccaggccagtttgtttccctccatccaggatctgggacacacttgcagaaagctgctttccagtcaccccagtcaagtggaggggcaggcaacggagcaggctggcgtgggtaaagtaatgagagcagcctcctgccagcctgctgaggggctgtggacacaccagacaggccctgggccactgcagagaagggaagaaccaggttgctagatcttgcccccaaagcaatctgttccaccaaggtggggacaggtgtggccaggagccccacagccctagcctttgtatccaggccaaaagacaccagggccatggttgcaggttgggggttacacacaagctggaaggtctacgcttcacccaggcagggcacccagactctgggcaggcaccaccccgtgtcagcagggtagccagagttccttctttttttttttttttttttgagatgaagtcttgctctgttgcccaggctagagtgcaatggcacgatctcggctcactgcaacctctgcctccctggttcaagcgattctcctgcctcagcctcctgagtagctgggattacaggtgcgcaccatcatgcccagctgatttttgtgtttttgtagagacgggatttcactatgttggtcaggctagtcttcaactcctgacctcaggtgatccgcccccctcggcctcccaaagtgctgggattaacggcatgagccactgcgcccagcctgccagggttacttcaagaggagatattgcctcttgacagtcggtccctttctggggcagccagagacacatccagaaaactgaagtgctgggaaggaagtggctgtcctagtcacctgccccttctctgcagcactgggtcgtctaagctccaaatgcttcacacaccacaaccaagcaacctgagggccaggaagatccctttggtgagaaggagagtcccaacaggaggccagatatggagagaaagcaaggtctaagaatacagtgtgggtggggcctctctggccctcagagaggaaaagggttcaacgtgaaatcacagcccctcttgcctgggttggtggacctgccaagctcactctaggccccaagatctgaatttggaaggaaagagcctgagaggagcccaggtaggaagagctccgagacctgagcgcccagccgggcgaggcctgactcctcacctttgacagtcctgagtggctgcggcccacggcatcctggggctgtccctccaaccaggaaatcttcagagggttatccaccaggccaacttcattctggacagccagctcctgccaaacacagcatctagtcctgtcccatccgttgagtcagctataaagaggctctctctacccccacagagagaacggaaccagcgttctagccctctaagcagagatgccaacctcagcagccttcaagtgatgggtgttaacgctttggcctttcctgcgggagaggggttgggggagctttctgatgtggggaggcgaggagcacaaagggtgggaaggcagtgctggggctcacagccccaaggggtgcaggtggagggtgtgaaggcaccagcagggagcagagtcaagtctgtgctctcctttctccccagagcaccccccatccatcccttcacacacggtgcctctatttccaggagtcaggggcccctgggaagagccttggctctaagctggcctggagattccctaggagtgcagaccacctaactcagagggcccacagaattgggtccctgccctagaatgacagggccacgaggggcccccaagcctcatgcagcactcaccgctgccttgacggttgcaaactccaccacagcagtgcctggcttcttactggaaagcaccaggttgagaacctcaccatactgtggggacaaaggggtcctaataagcatgacttggccttcaggatggcccaggtcatgccagagacaagcctgggctaccttgaggcccatggggcattttcagttgggagataacttcttgccccacctacttatcttagtgaagtgagatcagagataggaaagaaagaaatttttttctaggaacacagagcagcaaaggaatgatgagcaaagccctggtgacttagactgacacatttcattgcatagcgtccttgctagttgaacgtggtgaaaaggacggggctttcgtgccagatacgcacctcgtccctcccaacccactcaaccaagctctttgcttctaagggtaagggttagaccgaggtagcaaaggacagcgggctggaagggggcacatggccacacaagtgaaagcaaggctgtagcctggggagaagtctctaagacgtcccatggtctatgagacagaaaaaaaaagcaagtagatatgttaagggaagttcaggcattgagagcagagacctagggtgtggactgagacgtggactgagatgataggaaagagtggacgtcaacagggccgaccttctgcaaaagccgtaggaggacgtctttggagtagccaccttttgactcatcctccttcttgcacttccattttagctgaaaagagagcctcatgaaacactgattcttggctgaacagtacctcaccccacgactgagcttgacagtctgagcagacatcctcccaccctccaagcctccaaggctcctgcaatctggggagtgccaccagaaacattttccccttgggaacttgaaggcaggatggcctgctcaccccagggacgcttcccgcccagaagaccctctcctgagagggcttctagagaatcctctgccctgtgatcagggctaaaagcagcctttcgtggcaagctctgatctccgggcggctggagcatggagggaggtggtaatggtgcgggctccacgcagatccagcagccccaccagaaaccctcgagccacaggaagcatctattcctgctgaggggaggcggtgtgagtgtgaggtggcccacagatcctgcccaggctcacctttagtttgggggttccttggccttcagtattttctgcctttcctagaaatattgggaaaagaagaaaagtagaatatgagggagtcagagattctcccaaaggaaatgcagcccagagcaagaagggtctggaaagggtcactcctgaccaagggcaatgcctgcccagctctggtgagggcctggtggggaaagcagatgcccatccccagagaagctgccaccccaggggtggtctacccagctgcctcctgaaggccacttgtcagcactctctgaatggagagctaggaacactttctagggacaggaggcagagagacagaccatgaggttctacgggcacaaagtgtcccagggcccctccccgtggtgatctgtcccaaaacaaggccacctctgcttgggacaaagccaaatgtggccaggagatctcaggcagagtaaaaagcaaataggccccagagaactgggaggaagacgggataagtggcatgtgtcagagtaaggtaccatagggtgaccccagggttccagcaggtagaagcctccacagcagctccaccgaacagccagtgtggccgctctgagcaatctggagctaccttggaggggagataggcggggtgatagacctgcacctctcaacctctggtcacgctcctggcgtatctgctcccggatgagcctctgctgttcctccagctgccgggaaccctcttctctcaggcgttcgatctgcagagcagggggtgggggtgacaattctgtgcaggtccaattccaggctggctcaccttgtaaaaagtccttgggagcttccacctgcaagctagggctcagcaacctgtgggtgggacaaatcacccagctcccactgaaggtgcaaagagcatgccctctctagccacggcgaccaccaggtccatcctcccccacctcctcctcctgcaggtggccttctggccagtgtgcctgagtgctcacctcttgctctagtgtcctggtgctccggctctcctcttcctcctcactctcctgggcctgggcctgccgctcccgggcctccaggtctagacacaagggttgaatgaccagactgctggtctgttcagtttccatgtggcctcggcccaccccagctctggctgcctccccaaagtctcaatcacgacgagatcatacagtaactctgccccctccctccatgcccacgcccccgagtcaatttccattgagaaaaatcacagcacagaagtatggggtctagcagagtggccaggggtctggaagagttaaaaacagctcacactgaccaagctggttctctctagtgaacagggtgtgggtggtgcttatgtcagcagcccagggccatgtgtcaggggtgccaatgggcggagctgctgggctcgattcctgtggtttggcaccacagcttgacttgctttggctttgattcttttcacacactgagctcaggttctcactgtctcctttacctcccacctcaactcacatttaccaagcctcactgtggacctggctacagggatgggcagagtgttagggcatcaccccgggtcctggattgtgtgagggcgttaccttccaagagaaacctgcttgcaaccatgtgccaggccagctgctgtgagaaacccttctcttagtccagagaagtttgtgcactttacttacttagactctccttttctctctctctctttttttttttttttttttgagatggggtctcctggcacttgcttttcttttaatatagaaatagatattgggatgctatatgcacatattaaaatatatggatgttgaagagcaagaggaaaaggagaaacttgagtaaagaatgcttggactgggccaggcgcggtggctcacgcctgtaatcccagcactttgggaggccaagaggggtggatcacctgaggtcaggagttcgagaccagcctggccaatgtggcaaaactccgtctctactaaaaatacaaaaattagccgggtgtggtggtgcgcaacttagtcccagctactcgggaggctgaggcaggagaatcgcttgaacccaggaggcagaggttgaagtgagccgagatcgtgccactgcactccagcctgggcaacaagagcgaaactccgtttaagaaaaaaaaaaaaagagtgcttggaccatgctgctataaccagtgacttttttttaagtgagaaaaaaaaaatgcttgcagcaatcttattgggttgatgaaaatgttccaaatctgatttatagtcagagttgcatcatttagtaaatttacgaaaaatcattgaagtgtacacttgaaatgggttgatgttgtgatatacaaagaatacctcaataaagctattagagaagagaaagcctggacctctttgaatccttctgagggagcttctcaaagtgaaaagtctgggtaggaattggggttagaacaaattaaaagacccagccgggcacagcggctcgcacctgtagtcccagctactcaggaggccaaggcagaaggactgcttgagcccaggagtttgaggctgcagtgagccatgatggtgccaccctagcctgggtgacagtacaaaaccccgtctttctttaaaaaaaaaaaaaagaagaagaagactcagccagaaatggtgaatacaagcaccaatttttttgttttgttttgttttttgagatggagttttgctctgtcacccaggctagagcacagcagcgtgatctcagctcactgcaacctctgcctcccgggttcaagcaattctctgcctcaacttctcgagtagttgggattacaggcacccgccaccacacccagctaatttttgtatttttagtagagaaggggtttcaccatcttggccaggctggtctcgaactcctgacgtcgtgatccacccgcctcggcctcccaaagtgctgggattacaggcgtgagccaccgcgcccggccacaagcaccaattttactcacactggataagtttaaatcccacctccagcaagctcttaaacttttggtgccttagctcctttgcctataaaaaatggcttcagaggccaggtgcggcagctcaccagctgtaataccagcactttgggagactgaggtggatagcttgaggccaggagtttaagaccagcctggccaacatggtgaaactccatctctaaaaaaacggaacaaaattagccgggcgtagtggtgcatgcctgtagtcccactatcgtgaggctgaggcacaagaatcgcctgaacccagagggtgggggttgcagtgagccgagatcatgccactgcgctccagcctaggtgacagggtgagaccctgtctcaaaaaaccatgttcttaaaaaaggtttagtacccacacttccttgtatagttatgataattaaagggacaataaggcatttgtcacaatgcttagctaatattaaaccttattattgttattattcctaagagtgtctttaggaaccaacctctaagaacagcgttttgcccagagcctgagccaaaaggctttgagatgagttgctggaagtgaagcttcaggtgagggagatgaatgaaaatgaccacaggaaaccacaggccaccgagcactatgatggcacctaccaagcttcactttcttccttttctcatcaagtttctgggtcctctctgctgcttgcttcttggctttcctgaccttgtcatatgcagcctggcaggagaaaggggcacagggcagagggtcagtgagagagtaaagacagagccccggcaatctgcctggcccctagcccacgagccatcagagtggcagcctggtgactgggtctcctgggcttagacagcaaggactgtgccacatggcaaagggcagaggaccgaggttgagaggcagcagtggtctctaaccatgggggacgattccgatgaaggaggctgtgcttaccctggctgcagcatcggtcagcacctccaaggcctgagaaagctggtggaagagttcagctaaacataaggatcaaaaagacagaagaaaaataaagttaagacttcgtaatggtgtgctccctcaaaaaaaaaaaaaatcttcaaagaagtcacaggatggcagacaagccgacatcagcagatgacagaccaacaaggaggggtgagcatatcagcaactgaccagacacccctcacaggagggaagccctgggacccattgcctggagccaggcaatgtgtgcttacaccccacagcactcacatgcagagcttacatcgggaaacacaatgcccgggtgagtgggtttctttctccccacgccctgagaagagtctcacctgctctgggattatctggatttttgtctgggtggcaggagagggccttctgcctatacgccttctttacctggaagagtcagacagaagacatggccattcactctcatcccagggacaaacaggaaaaccttgctcaatgggtaaggggaatcccatgcacacctaaaagagaagctgctggcgcccacttcctagccaccagggagactggcaatggaggaggccaaggccatggagggagtgagccactgtcgcccagcacaggagctgggcccacctcctgctaagtgctcaacctcaccactgcagatgtccaggggctgctgcaacaggcaggagcacagtaccccgctttctcgacagccactcgaagacaggtactctacacattcttggtgggcatataaactggggcaacctatctggaagaaaattcagccatcaaaatttaaaatgttctttccctttgacccaagtcctaggaatctggacttgtagaagtatggcaaaaataaatatacaaggatgctctctacaacactgttgatactagccagccaagatccccatcaacggggagactcatttaaaagattatgattggccggtgcggtggctcacgcctgtcatcccagcactttgggaggctgaggtggacagatcacctgaggtcaggagtttgagaccagcctcactaacatagtgaaactccatctctactaaatatacaaaaattagctaggcatagtggcgggcagctgtaatcccagctacttgggaggctgaggcaggagaatcgcttgaaccgaggaggcggaggttgcagtgagccgaaatcgcaccactacactccggcctggcgacagagcaagactctgtctcaaataaaataaaataaaataaaataaaaaataaaataaaagattatgattgaggccggacatggtggctcacgcctgtaatcacagcactttgggaggctgaggcgggtggatcacttgaggtcaggagtaggagaccagcctggccaacatggcgaaaccccatctctactaaaaatacaaaaattagctgggtgtgatgacatattcccctgtaatccccctacttgggaggctgaggcatgagaatcgcttgattcatgcaggaggcagaggttgcagtgagccaagattgtgccactacactccagcctgtgggacaagagcgagactccatctcagaaaaaaaaaaaaaaaaaaaaagattatgattggccagacatggtgtaatcctgtaatcctggcatgtaatcctgtaatcctcatgcctgtaatcctggcactttgggaggctgaggtgggcagatcacttgaggtcaggagttcgagaccagcctcgccaacaaagcaaaaccctgtctctattaaaaatacaaaaattagccgggcatggtggcgtgcacctgtagacccagctacttgggaggctgaggcaggagaatcacttgagccccagaggcggaggttgcagtgagccgagatcatgccattgtactctagcctgagtgacagagggagaccttgtctcaaaaaaataataaaaaataaatttcaaaaagtttgttcaggaatttgccacgcttattaaaattttttttaaataaaatattatagtagacagaggtatccatgttctgacatagatcttattataaacttttgagtttagtccaggtgcggtggctcaagcctgtaatcccagcactttgggaggccgagacaggtggatcacgaggtcaggagattgagaccatcccggctaacacggtgaaaccccgtctctactaaaaatacaaaaaaattagccaggcatggtggcgggcgcctgtagtcccagctactcgagaggctgaggcaggagaatcgcttgaacctgggaggcagaggttgcagtgagccgagatcacaccattgcactgcagcctgggagacagaatgagactctgtctcaaaaaaaaaaaatttttttttgtcaggtgtggtggtgcatgcctgtagtcccagctactcaggcggttgaggcgagaggatcgcttgagcccaggagttccagccaagcctgggcaacatggcaagacctcatctctacaaaaattttttaaacatgagccaggtgtggtagcatgtgcctttgtccccctactcaggaggctgaggtgggaggatcactggagcccgggaggttgaagctgtagtgagcatgttcacaccactgcatttcagcctaggtgacagagtgagaccttgtctcaaaaataaaaataaaaaaattttaaattaaattaaaataaaataaaaaattagccaggcatagtggtgcgtgcctgcagtaccagctactaaggaggttgaggagggaggatcacctcagccaaggattttgaggctgccgtgagctatgatgatgccactgcactccagcctgggtgacagagcaagactctctcttaaatacatagaaagaaagaaaccccaatatttcttacataagtaaaaataaacacagctaccaagattctctttcgtgtgctacctaatagctgttgtaagtgaagacagtgtacacaaccccagaatccgtcctctgcctccaaggcctttgctttctcccttctgcttggtgtgtgttacctgctgctcaaacctcctggaggaagagctaagcagattggatttctaagcttccaagatggacgcaagaaacgcttctacacccaagtgtgctaaataaggactttcagaggtaagcagccagcatccacaaggtgagcacctgctgggcaactcctccatccatgaggcagccaccgggcccaggacctctaggggtgtgctgccacctgctgggccatagccagggcacctgccatggcagcccaagctgtttggttctcctgactgccttggaggcagcaggaaccacccaggacaggcgctgggcagagagggtgtagacgtgccacctgccttcccaatcgcccaccgaagcacatctgccctgcctgctcacctcccaccctaaccctccctgcctagctctgttttcactacaaaaaagaacaatattaagggaaaggaggtgctagcttaagacagtgtcatctttgcaatatatcatctttactttttaggtcccttatcattcgtcttttctttcttttgctctctttgcctgctttattgtgcctccagcctcattcctttactgaacatattttatatttcagggcccctgtttgctttttttcaataagtaaaacaataccaaaaacattataaagatgttctttctcaatctccccagccctctgacatcaaggttcattaacacatataaaagcacctacacacactgacaggagtctgttgggtgtttgttcctggcctctgggcccctcctctctgatcctatctccaccctctctctgggatgggtgagaggaagggagggggaggcggtccatgtcccagtatctatggcatcacctgcaacactaccttcaagatgaacttcctcaggactaggactagtaggcttgccccagggatgtaggggggttttgtggaagatgttttcttttgtatcatggggctcttttaaagtggtttaggctgggcatggtggctcacacctctaatcccatcgctgtgggaggccgaggtgggtggatcacttgaggtctggagtttgagaccagcctggccaacatggtgaaacttgtatctactaaaaatataaaaattagccgggtgtggtggtgcatgcttgtaatctcagctatgggggaagctgaggcagaagaatcacttgattccggggggcagaggcttcagtgagctgagatcgtgtcactgtaccccagcctgggtgacagagtaaggctctgtctcaaaaaaataaaataaaagtttgtatgttccttgttataaatctgagagggggagtagaagtgagtgtgaagaagaaggagcaggctgggtgtggtggctcacgcctgtaatcccagcattttgggaggctgaggcgggcgaatcagttgaggtcaggaattcgagaccagcctggccaacgtggtaaaaccccgtctctaccaaaaatacaaaaattagctgggcgtggtggcacacgcctgtagtcccagctactagggaggctgaggcaggaacctgggaggcggaggttgcagtgagccgagattgcaccactgcactccagcctgggcgacaaaaataaaattctgtctcaaaaaaaaaaagaaggagcagtaagaaagcaagacagaaggggtgtccagcagtggcatctccttcattttctttcctttttttgagagaatgctttctgaattttattctaagggaatgataaatattcttttgtgtttcataatttattttgaatgttctatattggaattttggtttttcactgtaataggaaaataaaattattcaagctgaaaaatccactcatattgtcaaatatgctttacatatattaacttatttaattcttaaagcccctatgaggtagaaattattatcctcctcattttacaaatgaggaaactgtgacataagggttaattatgatacccaaaatccattcaatgaaaagccatacaaacattactttaggcaaaaactattctactccagccaattaccacagaaaaaacagtggacaccaccccacccatgccatcaaaggccaggtagagagcatagacttccattcttgctaccctaaacctctgccagagtggtgtcagataaagccaaacagggaggctaggactttcatccccaacagatggaaatacaaaaatataaaaatatctctgggccgggcgtgttggcttacacatgtaatcccagcactctgggaggctgaggcgggcagatcacctgaggtcaggggttggagaccagcttggccaacatggtgaaaccccgtcgctactaaaaatacaaaaattagctgggcatggtggtgggagcctgtaatcccagctactcaggaggctgaggcaggacaatcgcttgaacccaggaggcggagcttgcagtgagccgagatcatgccattgcactccagcctgggagggaagagtgaaagtccataacaacaacaacaacaaaacaacaacaacaacaacatctctgaaagaaaagggatatccccgaaaaagcttccagtctcagtatcgtttattattaaataatcctaccttataaacagctgaaagggttatagctgatatttactttctataataagcttgtattacttttcaagtgatacaagaaaaaaactggtaagaaacaaaaacaaaattgtttagcttctttccacaattctaagctaggaggcagcatggttcactaaaagagggcaagttctggagtctggcagatgtattttcaaattcggaatcttctacatactgatagcatgaccttgggcaaattactgaagctcacacagccttagggacttcaacatcaaactgagaagaataaatcctacacacagggctgctggaaggattaaagaaaatgatccgtgtaagcacctgacaaaaactaggtgcttcctacaagttcccaaacctttctctcctctacttctggaagagggtaaactgtgacaccaggccagcaggatgccaattggacaggaattcaggaatggaccctggtccacagtggatgcaggtcaactccatttgaattctctaggtggacagggctggatttgagtctgctgtggggtagatctaaaattcaatcctgggttcactcccagggtctctgaaatactcttattcaaggggtagaagggatgggtaggtagcctgagatcttccagagtggccttgaatcaaaacccagctggcctaagaatgttggtcaagtatgtctgtcttgattaactagttattactatatttaactgttaaacctgccctgggcagggcccatcccttggttttagcctggaagaccagttttgactttgaaccggttggcctagaatttggtgctttgtactacaaactagattcccagctttgtccagccctcctggagttgactgctgcctgaagaatttctcaccatgtaaacacaactctcctaaagcaggcctttgaaaaaccttccggtctcaatattgtttattattaaataatcctaccttatgaacagctcaaaaggctagattcagggtaaaaatgtacaacaattattttttataactatcacaaaattgggaaggagaggaactttcagaagaacaagaaatagaagggccatcctctataatcttactccttatgatataggataaacaggactgctgaaagccaggtatcccgggttggaagctcctccagaaactgactctggcccaggtccagtggctcacgcctgtaatcccagcattttgggaaggtgaggcgggaggatcgcttgagcccaggagtttgagaccaccctgggcaacagagcaagaccccatctctaaaaagagaaagaaagaaactgtgtctgcaggtgctgggatcactgaggcagagctgaagcagccacagcaaggtgtggcttttcacttgcagcttttcttctttacctataggtttcccctaaatcccctggtctctctagcgcttagaaacacttgcatttctgagacttcacaaaggatccaggtgacagttcaaatgtttccaacccaaagttccccatccagatcatggcttttcagaggagaagctctttctaaggcccagcctcagaaggacgaagatctcagataaatgtaagctccgtgagtacttcgaactgcaatttgcagaaacttggtctttctcctgatggctttctaaaaacctcactgtctaccaccctttttccatcctagactggttgagtttaatctgtttttgatgtctcaggatcatcatccagaacatcaactactgaatagtatgacacgttctacggagagtggtgtcaggcttttcatttgcttccctaggtggcgaggattttaaattctactcttttaatagttttcctattacttccttagttggcctctactagactgccagatgccagcccttccctagaagtgctgctcatctgctgcttcttttctggtatggtctagagaaacagataagctggttataactataccttaaatgagagcataagggtataggaaggtatgggggttccccttacaaataaagtggatgtacttaggaggcagggagttctgcttctccccagggtccagaacagtgaacagcacctggcattcagcaggcacacaataaatatctgttgcatgaattggcaaacattcatttgttctcaaccaaaacacaatcggaaacctcaactatgtcaattacttcagacccactgaggagcagaaggaagtaggtgccatccagaccctaggagatctgaccactatttcacaatttctcctcctccctgctaacacctcctcttaaaaaaccaagtctgggaaagggaaggaattactaaagcagactgccaggataaccacagtgggaactaaatgttaccccctcattgcccacatcagacaatgaataataaattggcagccacccagcccttccccggaagctctataaccggttctaccactttcagcaacctgaacccagagcaggggaggagggctggaagctgggtctctagccacctccactgggttttgccgcaagcacacagcagggcctctgacatccacctgcctccagtttcacctcttgatgggggaaggaactcctgactcacccaaaaaagctaagtgctaagggatccaataaatacaaaatagccatcattaacttaaaagaaaggtgccctacaaagaagggatcattattttttaaaaggttgctgtcctttcttgtaataaagcttggagccaggtaagtaagtggtacaagtaaagaggccgaggctgataggttagacttagataaggaggacacagagggaggcagctctatgtgacaacaagcactgaatggacaaagcatcccgggtaaatcagctggaaacccactgccaggcccagttccagtcacaggcacagtgagtgataacagctggggcagccacgtctccccaagcccggagaggcagatgcctccccatcccctcactagcaggaaccccagaggtatatgactgcctgatgtcacacgcaggaagcaaacaacagagctctgggcacctgcctaaaagtcccctctggccaggcatggtggctgatgcctgtaatcctaacactttggtaggccaaagcaagaggatcgcctgaagccaggagttcaagatcagcatgggcaacaaagcgaaccccacctctacaaaaaatttaaaaatgggccgggcacggtggctcacgcctgtaatcccagcactttgggaggccgaggtgggtggatcatgaggtcaggagatcgagaccatcctggctaacacggtgaaaccccgtctctactaaaaatacaagaaattagccgggcatggtggcgggcgcctgtagtcccagctactcgggaggctgaggcaggagaatggcatgaacccgggaggcggagcttgcagtgagccgagatcatgccactgcactccagcctgggccacagagcgagactctgtctcaaaaaaaaaaaaaaaaaatttttttttaaatgagccaggcatggtggcatgcacctgtagtcccagctacttgggtggggctgggaaggattatttgagtccacgagtttgaggctgcatgccactgcatgccagcctgggcaacagagtgagatccatctctttaaataaacataaataaataaaaataaaagagaagttccctgtgcctgaaagattgatcctttcattccttacagcctgtgacccctattgggacagcactacagagaagtccccaaatgcctgggcactgtacaacctatgggctgctcccaaggcttggcacaagcagagagctggccaaccccagacagccccctcagctcaatgctcccaaaacatgggcctgctggtggtaccaagataataccagagaacctgggcctcacactgacatccctctcaggctgatagccatggcccatggttcagtctcagaacaggggcctgtgccacctagaacagctgggaccacacacggagcctggcctgcttctccccaaatgatggcccttgtacgccctttgggctctggttcctcagccaatcctgaggccactctttagctcctcccatccccccggatctcatctccaggtcccccttccttcactcccccacagtactccctcctatcctgctctcctcggtccacttccccaaaccagcccacttgaaacccagtctacagccctctttctcctcctcagataccaccctgctctctggcccacctcctcccttttaaccttatcctaaccaccgctatattaggctcagaccccaaaagcctttcctaccttctctcagcttgtagattctcatgcccagatctgccagaaacgtctccccactgcctgctgtcactcttaactcctagaggcctgggtctctagccccagaaccacttcctctgcccagtctctgccctttcccagggggtagaactccttccctctgggccctggtacttcctacacctcattcatttctgtcttcccttaatgcattgtttcctttataaacaaatttgtattagtaaaaagaaattagttgatttcggaagtctgaggcaggagaatggcgtgaacccgggaggcgcatcttgcagtgagccgagattgcgccactgcactccagcctgggagacagagacagactgtctcaaaaaaaaaaaaaaaaaaaaaaaaaaaagaaaagaaaagaaatgagttgatttagtgaaaataactaaataacaatacttacgaacagcaaaaatagggaaagcgctatgcaaatggaaaacattttgaatgccactaacttcaaggaaatggaaactgtgctatggtagttttaacacaaatcttaacacagttccttaagctgttcagagcagcttactacctgctgggtttacccaagtcccaggcaggtaaaatctctatctgtgttacagatggggctgcgagactctctggggcccacagacccgtctcctgttgctctaattggtcctgaagtgtgggtcacggaaaaagttctcaaagaggagtagaaaattcaggtgtgggccgggcgcagaggctcacgcctgtaatacaaacactttgggaggctgaggcgggtggatcacttgaggtcaggagtttgagatcagcctggccaacatggtgaaaccccgtctctactaaaaatataaaaatcagctgggcatggtggcgcatcacatgcctgtaatcccagctacttgggaagctgaggtatgagaatcacttgaacccaggaggcggaggttgcagtgagccaagatcgtgccactgcactccagcctgggcgacacagcgagactctctttccaaataaaaataaaataaaaataaaataaggtggcagtaccagccaccttatgctgggcgaatcacttaaattcttggagtctttgtttccacatctaggaattggtgccagtagtccttgaccacctcacaggcttgctttcaaggtctcatcaaatgagataatttatgtgaaagcactttggtgtcatagaaatgtgaggtattatcttgaatgttaatgaatcgcttacagcttacaaacacaaatgaatcattccttttgacttaacaggcacctaagtaacttcaaaaatccagagcttcagccagacagctttggtgaagagtgatactgaggggacttggagatactgagaggacttagagaccagctgctagatccacccagagctggtcaggcccttggtgaagaacaactatcttcaagtgaaaccaggcttggaaaaaataacttaaaataaataaaaaaaaataggccgggtgcggtgactcatgcctgtaatcctagcacttttggaggccaaggtgggaggatcccttgagcccaggagtttgagatcagcctggacaatgtagggagaccctgcctctaaaaaaccataataaataaataaacaaataaataatgtggtaatatattgaggctacaaaaaaaattttaaaaagctgggtgcggtggctcatgactgtaatctcagcactttgggaggccaaggcaggcgatcacctgaggtgagaagttttgagaccagcctggccaacatggtgaaaccccatctctactaaaaatacaaaaattaactgggtatggtggcgtgtgcctgtagacccagctactcgggaggctgagggagaagaattgcttgaacctgggagggggaggttgcagtgagccaagatcgcaccactgcacaccagccagggtgacagagtgactccatctcaaaaaactaaaataaaataaaataaaaaacaacaggcagctggtcgcagtggctcacacctgtaatcccagcactttgggaggctgaggtgggcggatcacctgaggtcaggagttcgacactagcctggccaacatggtgaaatcctgtctctactaaaaatacaaaaattagctgggtgtggtggcacgcgcctgtaatcccagctactggggaggctgaggcaggagaatcgcttgaactcaggaggcggaggttgcagtgagccaagatcacgccattgcactccagcctgggcaacaagagcgaaactccatctgaaaaaaacaaaacaaaacaaaacaaacaggctcagtacccaacctcaaggcctcagcacctggtctagatataagaggttctgggaaaagccccctttggagacagcagattacatcaggcacacttcagatccagaaatggcccccagatgctcacagaatcaagtgtaaccaccctagggcctagaggcccaaacacacatttctcagattcatctcctgcgacctcctcagcaaaccctaggccatgcccattccctgtcatgctaggcactccacatctgcatgccccggttgctccttcaagcccttgtctgtcctctgtcctcaaaaaccaagtcttcttaaatttttaagaaacaatgttgatgcaccaccttctagggtataaaagaaatatgtagctagtggtaccaagataatagctagcttaaagataaaatagccttttccttgcagtaatttatatgctataatataacctccctcccagaaaatgtcaatattaagtttccctggtagttttcctgataaatagacttaagctttgagtcttgaaaaacaatcaaaatgcattttcaaacatctggcttccccaggtaattacctgccaagatgaatgagctacacacccttcaaagggcttcaaatgaaaggtaaggctgctacagacagaagagaaagacaggctggacatgctgactcatgcctgtaatcctggcactttgggaggccgaggcaggaggactgcttgagcccaggagttcgagaccagcctgggcaacatagggagaccccatctccacaaaatatttttctaaaaattatccaggcgtggtggtgcactcctgtggtcccagcctggaggacagagtgagacccccagaaatacacatgtgggctgcacaaaagtggaaaggatcttgattggagctctagtctcaggctgatgctcactcgctggatggtcgtggaaaattttgtaacctctctgaacctccattctccagtctacaaaataagacagtaaatgaccatgaagatcccttcttttttttttttttttttttgagatggtctcacttgtcacccaggctggagtgcatggcacgatctcagctcactgcaagctctgcctccgggttcacgccattctcttgcctcagcctcccgagtagctgggactacaggcacccgccaccacgcctggctaatttttttgtatttttagtagagacggggtttcaccatgttagccaggatggtctcgatctcctgacctcgtgatctgcccgcctcggcctcccaaagtgctgggattacaggcgtgagcaccgtgcccagcccatgaagatcccttctaactgctgcaatatattcttttctcccttcaagatcttgcataaaaacaccagtcatataaatcatgtcttcctctttattcttacagcattttcttatatactcttactgaacctcattcattgcacctcagcgttcactgagtatataactgtgtgagctgtcagaagtcagaagtggtatcttactcagctctaagtcctaccatgctcaaacagtaccttgtccatggtgagaaactccattcatttgttgatgtgaactaaatgttgaactctggtgatcctcaattttgttctacttgatcctccaccgccttcctaccctgaccactgcctcaattgagaatcactgatttgctgttaggtgactcagcactaatgtgtcaggaatggagtgagtaaagaaggggtccaggtggagggcagccttggacacaagctgggggcgattcatatttgactttccaagcttacagtgtaaggaagatggactcacaatgaaaacagcaagaactgactcatagtgagcgctcactctatgccaggcactgtgccaaatgcttacgtggatcaagcctcaaaacaatgcgatcaaggacagactatcatcatcctcgttttgcagacgaggaaaccaaggtacagagcggttaaatatttgctccaggtcacaaactaggtcatggggcaagtatccaggcaatctgactccaaagtccactttcttaactataactgctaataagtacaaaggtgattatgaaggcacatttacaattctaacatctgtatcatgatttccatctattctcaacacatggtagatgcaacaagcaacaattcttagccttacacattaaagatagttataaaaactgttactttcaatcccagcactttgggaggccgaggcgggcggatcacaaggtgaggagtttgagaccagcctgaccaatatggtgaaatcccatctctactaaaaatacaaaaattagccaggcatggtggtgcatgcctataatcctagctactcaggaggctgaagcaggagatctgcttgaacccaggaggcagaggttgcagtgagctgagattgtgccactgcactccagcctgggggatagaatgagactccatctcagaaaaaaaaacaaaaacaagaacaaaacctgttactttcggctgggcacagtggctcatgcctgtaatcccagcactttgggaggccaaggccagaggatcacttgagcccaggagttcaagaccagtctgggcaacatggtgagaccccatctctacaaaaaatacaaaaattaccctggcatggtggtgcacacctgtaagccgagctactcaggaggctgaggtgggaggatcacctgagcccaggaagtcaaggctgcagtgagctatgattgcaccactgtactttggctggggcaaagcgagaccatctttaaaaaaacaaaaaacaaaaataaaaacggttactctctttattaaatttatttatttatttattttttgagacggagtcttgctctgtcgcccaggctggagtgcagtggcacgatctcggctcactgaaacctctgccttccgggttcaagtgattctcctgcctcagcctcctgagtagctgggattataggcgcctgccaccaagcccagctaattttttgtatttttagtagagatggggtttcgtcgtgttggccaggctggtctcgaactcctgacctcaggtgagccccccgcctcggcctcccaaagtgctcggattacaggcatgagccaccgtaagtttatttttaatatatatttttagccgactcttgctcctctctggaaaaactgttattttctgcaccaacttcctctctaggaaatcatcagctgattaaaaaacataaacttctcggctgggcacagtggctcacgcctgtgatcccaacactttaggaggccgaggcgggaggattgcttccatgaccacgcccctgcactccagcctgggcgggagagggagatggtgtctcaaaaaaaaggaaggaagggaggaaggggaggaagggatggaagggaggggggagggaaggaagaaaaatatgaatttctagaagaactgccaacgttagcctctgcatttcaaaatgatgggccccaggagcaagagacagaaaagatggaaacaaacaagatgtgggggccctaaaaccgcttctcttcacatctgtttccttagcaccaggctcagagtttgacacacaataggcacttaataaaaatgctgtttatgggaaatgtttcaaccctcctctaaaacactcatggagaaaaggaagggaaatgaaaaagaaccaggcagaacactatcaagtttaatttaataaaggttcagtgtgggctgggcgtggtggctcacacctgtaatcccagcactttgggaggctgagccaggcggatcacaaggtcaggagttcaagacaagcctggccaacatggtgaaaccccgtctctactaaaaatacaaaaattagctgggcgtggtggtgggcacctgtagtcccaggttgtgaggctgaggcaggagaatcgcttgaacccgaaaggcagaggttgcagtgagccaagatcgtgccactgcactccagcctgggcgacagagtgagactctgtctcaaaaaataaaataaaataggttcagtgagtgcctgctctgggcaaggcaccaagcgcacagcattgctgctttctagagtcagggctgcaagtggaaagatggaagacttcctacctaccgggtgggaatataggtcagtatgacctttctgaaatgcaattctgcattataaaccaaaagcttgtaaatatatttactctcagtctaataatttcactacatcataaaatattactgcccaagaaaataagaatgcatgttcatcaatcactcaacaaagatttattaagcatctaccaagggcgaggcattgttctaggtgctggagacatagtagtaaacaaaacagaggaagtcctttccttcctggattttttacattctaatgggagagcaatggtaagcaaatgggcatgtactataaggtgtagtagtgagatctacttcgaaatagcagataagggtgtggggctagctcatttaaataggtagtcaggaaaagcctctctgagcagatgatatttgaatggaaacctgaattaggtgtgggagatagataactgcccagagaaagaattttctagcagaaggattagcaagtataaaggccctgaaaatcaggaatgtgttaggtgagtttgaaaaaaatcacaggaggcccacttcacacttattaggatggttattatccaaagaaaacagaaaatttaagtgtggaaaggatgtggagaaaatggaactcctgtgtattgctggtgggaaggttaaatggcacagccattgtggaagccggtatgtcagttcctcaaaacattaaacatagaattaccatatgatctagcagttctccttctgggtatatatcaaaagaactgtttttgtttttgtgacccaatctcactctgtcaccaaggctggagtggagtggttcaattcactatagctttgaccccctgggctaaagcaatcctccctcctcagcctcccgagtaaagtagctgggactacgggcgtgcgccaccacaatgagctaattttttctttttttttcctttgtagagacagggttttgccgtgttgctcaggctgatctcaagctcctaggctcaagcaatcctcctgcctcagtctcccaaagtgctgggattacaggcattatccaccacactagaacaagaaattagagtagggactctgccagggatcgtagctcatgcctgtaatcctagcactttgggaagccaaagcagaaggataacttcaggccgggagtttgagaccagtctgggcaacatagcaaaaccccatctctacaaaaaatttaaaaatcagctgggcatgatggtacatgcctattgtcctagctactcaggagactgaagtgggacgactgcttgggcccaggaggttgaggctgcagtgagctgtgatcgcacaatttcactccagcctgggcaatagagcgagaccctgtttcatcaaccacaaaaaattcataaagtagggactcaaacagatttctttctttttttttttttgagatggagtttcgctcttattgcccaggctggagtgcaatggcacaatcttggctcactgcaacctccgcctctgggttcaagcgattctcctgcctcagcctccctagcagctgggattacaggcacccgccaccatgcccagctaatttttgtattttagtagagccgggatttcactatgttggccaagctggtcttgaactcctgaccttgggtgatgcacctgcctcagcctcccaaagtgctgggattacaggtgtaagccaccgcacctggccgatctcttttttttttttttttttttttgagatggagtcttgctctatcgcccaggctggagggcagtagcacaatctcggctcactgcaacctccgcctcctgggttcaagcaattctcccgcctcacccccctgggtaggtgggattacaggcacccaccaccacgcctggctagtttttctatttttagtagagacagggtttcatcatgttggcaaggctggtcttgaactcctgacttcaggcaatccaccacccttggcctcccaaagtgctgggattacaggtatgagccaccacacctggctcaaacaaatttctaacccacattcatactagcattactcacaatagtcaaaagctggaaacaaccaaaatattcatcaacagatgaatggataaacaaaatgtggtatatacataaaatggaatattattcaaccttaaaaagaaaggaaactctgacacatgctacaacatggctgaaccttgaaagcatgatgttaattaagcgaaataagcctgacacaaaaggacaaatattgcatgattccatttatatgaggttcatagaatagtcaaattcatatagagaaagaaagtagaagagtggttcacaggagctggggggaggagggaacagggagtcactctttgttaagtacagagtttcagattgaaatgatggaaaagttgtagagatggatggtggtgatggctgcacaacaatgtaaatgtacttaatgccagtgaatcctttaatcaaaaaggattaaaatggtaagcagtaaattttgcgttaaatacattatttatcacaatgttgtaggaaatatcaggaggactgatgtggctggagcacagtcagcaaaggggagagtggtggcagggaacgtgcaggacaggcagtaagggccgcgtgggccaggggaaggacttcagatttcattctaagactgagagaagccactgggagttgtgaccagaggtgacaaaatctgatttacattataaaggctcactctggctgctgtgtgaaaaggatcaagaacagaaataggaaaaggattagacggtcactgcagtcactcaggtaattcctgagattactttggaatctctcttgaaggtttgcaaacagcgttaactcacgacttaatccttcattctggcagccgtggtgccccgccttgtgagtgtgtgtgtaagaatttggcgcttgctggctgggcgcggtggctcacgcctgtaatcccagcactttgggaggctgaggcgggcggatcacgaggtgaggagatagagaccatcctggctaacacggtgaaaccccgtgtctactaaaaatacaaaaaaaattagccatggtggtgtggtggcgggcgcctgtagtcccagctactcgggagactgaggcaggagaatggtgtgaacccgggaggcagagcttgcagtgagccgagatcgtgccactgcactccagcctgagcgacagagcgagactccatctcaaaaaaaaaaaaaaaaaaaaaagaatttggtgctcgctgcttcaggctctagcagactgatcctctccctaggagcacttccacccgaaacccaggtcctcaacttaaggctttcccacaaaaaaaaaaaccacaccatgccctgcctgtatcctctagggctggatggggaacaaggagaatggctgattgttaaatccccatgaaaggtggtgtttagctcacttttggcctgctaggtttgttgtgatatgagggaagaacatttgcagaaaggctagttctgtgtacagaaaggcagagttgaacttgtccctaacttgaagagggatgagcagatttttctgtaaaggcccccggttgagagtaaaaattttagggagctacatatagtctttgttgtatattctcctttgttgttttgtgtttgtttctgttgctggatcatattacttctatatttaattaccatatgaatcatatggtaattgttgggtcatatggtaattccatgtttaattttttgaggactcaccataccatcttaacattatctgcaccaccaacaatgcacagggctccaatttctctgcatcctgaccaacatttatttctctctctctctttttactttttatttttagagacaaggtctcgctttgtcatccaggctggagtgcagtggcacaatcatagcgcactgtagcctggaactcctgggctcaagcaatcctcccacattagcctctccatgagccatcacaccagggttttttttttgttgttgttgttgtttttgtcttcataatagctatcttaatgggtgtgaagtggtatcacaacatgtttttgtttgtttgttttttgagatggagtcttgctccatcacccagcctggagtgcagtggcacgatttcggctcactgcaacctccgcctcctgggttccagcaattctcctgcctcctcgagtacatgagactacaggcaactgccactacgcccagctaatttttgtatttttagtagagacggggtttcaccatgttgggcaggctggtcttgaactactgacctcaggtgatccacctgcctcggcctcccaaagtgctgggattacaggcgtgtgccaccgcacctggcctcaacatggttttgatctgcatttacctaatgactagtgaagttgagcatcttttcatgtgtttattgaccatttgtacatcatctttggggaaatgtctattgagattgtctttttctttttttttttttaatttttttacagacagagtttcactctgtcacccaggctggagcatggtggcgtgatcagagctcactgtaacttcaaactcctggcttgcccattttttaaccgagttgtttttttggttgttgagctgtgtttttttttctacaatcatttaaacatgtaaaacccattcttagcacataagccattaaaaaaaaaaaaggtcagctgggcacggtggctcacgcctgtaatcccagcactttggtcaggagttcaagaccagccaggccaagagagtgaaaccacatctccactaaaaatataaaaattagccaggcgtggtggcaggagcctgtaatctcggctactccggagactgaagcagagaattgcttgaacctgggaggcagaggttatagtgagccgagattgcgccaccatgctccagcctgggcgacagcgagactccgtctcaaaaaaaaaaaaaaaaaggtcatgggccatttggcccctcaaactgtagtttgccctactccttcattttacatttggggaaagtcaggtcctgagagacgcagtgactgcccttggtctcctgattctcaagtaaagtcgttgcagtggtctctttagctactacttcattcattcaacaaatacttattgagaacctactatgtgccagtcaccaggtaaggggctgctacagaagagcatgaatcagatctggtcctcagaagtaggagtgcagaggggattaaggcatgagacaaataatcacacagataaatacataattgcaaactgaaataagtgctagaaaaaagaaaaaccagctgccatgaaatagaatataaggcaaggcttctctgaggatgccatttcgactgagttctgaaggacaagtaaaagcaacccagattagcagaaggggaggaagagcattcctggcagaggaaaatgtatgaatgagctaagaaattgttgagtattggctgggtgcggtggctcacgcctgcaatcccagcactttgggaggccgaggtgggcggatcacgaggtcaggagatcaagaccatcctgtgaatggtgaaaccccgtctctactaaaaatacaaaaaattagccgggcgtggtggcgggcgcctgtagtcccagctactcaggaggctgagacgggagaatggcgtgaacctgggaggcggagcttgcagccactgcactccagcctgggtgacagagcgagactccgtctcaaaaaaaaaaaaaaaaaaaagaaaagaaaagaaattctattgagtattttattagaagtgctaaatagggttttcagggagtagcaagatcattccattttctgtgaggagaattggagaggctcaatagatcagaatggaataggctgaaagcagaaaaaagttggcaggctcctctaaacattcagctgagtggatgggggcctgggctggagcagtagtggtggagacagagagggtgaacaggtttggggattatttgggaggctgactcatcaggacccggtgatgttctagatggcaggggtgagaggatagggaggtactgagaatgactccaggttcctagcttgaatggatggatggtggtgccacaagatggggaaatccaaggaaggagcaggtttggagagagaattgaaagagttcaatttttttttttttttttttcgagacagattctagctccgtcacccaggctggagtgcagtggcttgatctcagctcactgcaacctccgcctcccaggttcaagcgattctcctgcctcagcctcccagtagctgggactacaggcacgtgccaccgcgtctggctagtttttatatttttagtagagataggatttcaccctgttggccaggctgtctaaaactcctgacctcaggtgatctgcctgcctgggcctctcgaagtgctgggattacagacatgagccactgcgcctggccaatttttggatgtagtaagatttagaccgctgtgaaacatccacatggagggatcaaacaggcagatagatacacagatttgagattcagagaagtagtctgaacacaagttaaatttggtggtggtgctcatcactaccactgaaccgcgctggacagggccagggagccttagcagaaggagcagaggcctgagctggacatcagggcatcagggcatcagggcatcagggttctagtcccaattctgccactaaccaccttctccgagctgcagtttcgccatcagtaacacagggagcttggcctccattagggcttctttgacttttggattaaaattccctcctctggccaggcgtggtagctcatgcctataacccaaacacttttcagaggccaaggcgggaggactgcttgaacccaggagttcaagaccaacctggccaacatggtggaacccgatctctacaaaaatacaaaaattagccaggcatggcggtgcacacctgtggtcccagctacttttgaggctgaggtgggaggattgcttgagcccaggaggcagagtttgcagtgagcagtaatcatgccactgactccagcgtgggtaacacagagagaccctgggtcaaaaaaaaaaaaaagaaaaaaaaagtcctcctctcctccagaataaatacaaaaaaaaaaaaaatcacgcatgattttcagaggttccttcacccagttcctggagcctttctgtagagggcaaattgagaactcctaggctatttggacaaccagtttaggagttcttccttgtatacactttaaatatttgtttgtcctctaggttgccctatggcagcaacctaggttgtctatgacaggtattaaaccatggtgcggggacaccagggcctaggtttttcttgctttctaccaaaaagtgtgttgccatgaagctagccagtgtatccaaagtgtaaatgggagtaagtgctagaaaggagaatggctgctatgaaaagaaaaataggtaaggcctctttgagggtgccacctacttatgctccaaaatagactgtatgtattaatatatacatttgctttcttggaatgccctgcctccatctccacatgtccaaactctgcccattcttcaaggccccaaataccttctctcctgcctttattccttctctcaaactaatagcaatctcagcctacactgaacatccacagcactttgtacccctcttaaggaactcaccatgtctcccttgtatgcgtgaatcttgcccccccattaaaggcaggagcagcacctgttaccctttatagagtggcttcacacctatcccttatctcatctgagttagaactggatcccagccaccactgcccagctcagaccttggtctcttgcctagacaccagccccatctgaccccctagtggcagctcttccattcctcccacccccacccattttcattatgcacactagtgttgaattttcttttcttttttaagagtggcagggtctcaccctgtcatccaggctggaatacagtggcaaaatcatagctcactgaaacttcccaggctcaagtgatcctcccacctcagcctcccatgtagcggggactacaggtgcgtaacaccctgcccagcttttttttttatatatagagagagagacaggctctcactacgtttcccaggctggtctcaaactcctggcctcaagcgttccttccaccttggcctcccaaagtgctgggattgcaggtgtgagccatcacactcagtcaaatactttctttaaaatccaattatgggcagggcacagtggctcatgcctgcaatcccagcactctgggagaccaggcaggaggatagcttgaacccaggagttcgacaccagcctgggcaatatagctggaccccgtctctggaaaaaaaaaaaaagcaaaaacaaacacaaaacaaattagccaggcatgatgatgcacacctgcagtcccaactacatgagaggctgaggtgggatcacttgagcccaggaagtcgaggctgcagtgagctgtgattgtgccactgcattccagcctgaatgacagtgagatcttttctcaaaaaatagacataaaaataaaaaaaaaataaaatctgattatgtaacttctctaattaatagagaatgacttccaactgacttcctcaggagttctcaacttcagggttagaaactctagatttcagccgggcgcggtggctcacgcctgtaatcccagcactttgggaggccaaggccggcagatcacttgaggtcaggagttcaagaccagcctgaccaacatggtgaaaccctgtctctgataaaaacacaaaaattagctgggtgtggtggcacatgcctgtaatcccagctgctcaggaggctgaggcaggagaattccctgaacctggggggcagaggttgcagtgagccaaggttgcaccactgcactccagcctaggcaagagagtgagactccgtctcaaaaaaaaaccctccagatttcccacttggatcttttgtgaaatgtctcaaatagtttctcactattaataaagtactaattaaataatttgcaggcagggcatagtggctcacacctgtaatcccagcactttgggaggccgaggtgggaagatcacgaggtcaggaatccaagactggcctggccaacacggtgagaccccgtctctactaaaaatacaaaaattagctgggcgtggtggcgggtgcctgtaatcccagctacttgggaggctgaggcaggagaatcacttgaaacaggaaggcggaggttgcagtgagccgagatcatgccactgcactccagcctgggccaaagagtgatactctgtctcaaaaaaaaaaaaaaaaaaaaaattagccgggcgtggtggtacatgcctgtagtcccagctactccggaggctgaggcaggagaatcgcttgaacctgggaggcagaagttgcagtaagctgagattgcgccactgcactccagcctgggcgacagagcgagactccgtctcaaaaaataataataggccgggcacggtggctcacgcttgtaatcccagcactttgggaggctgaggtgggcagatcacgaggtcaggagatcgagaccacggtgaaaccccgtctctactaaaaataaaaattattagccgggcatggtggcaggcgcctgtagtcccagctacttggagaggctcaggcaggagaatggcgtgaacccgagaggcggaggttgcagtaagccgagatcgcgccactgcactccagcctgggccacagagcgagactccgtctcaaaaacaataataaaaaataataataataaagaatttaaaaaataataatttgtaaacatagagcacttagaatactatccagaaaaaaaaaatactgtctaggacatagtaagcattatacagatgttaggaattattaatcctaaaatattgaaacacgagagaggtggagcagatgcttttgatgcttcatagacatcccatggccatttctgatttcagctgcggctgcaggggacagatttgtgcaggttgacagcatttctcaagggccctctgggtctctctgattttctgccccagagcttcctcttctcaaaagctcactcaccccatgagcagggcagcccagaagtactgggacattagtgggcactatttttttttccttttttttttttttttttgagacagtctcgctctgtcgcccagactggagtgcagtggtgcaatctcagctcactgcaacctccgcctcccgggttccagtgattctcctgcctcagcctcccaagtagctgggactacaggtgtgtgccaccacgcccggctaatttttgtatttttagtagagaaggggtttcagcatattggtcaggctggtctcgaacttctgaccacatgatccgcccgcctcggcctcccaaagtgctgagattacaggcgtgagccaccgcgcccggcctagtagacactaattttctttctttctttctttttttgagaaagagtcttgctctgtcgcccaggatggagtgcagtggcgcgatctcggctcagttgggcactaattttcatttgatgaacgcctctccttcgtatattgttaaaactaccaccatgatccagggggagataaaagaaatcctaaatccagcttgatcagtgtttcactccctggcatctttatcaccacctaaggtagcatggacctctataccatctgccttaaccttctgatcctcctgcttttagcccactaactagcacatgctgagaagggcatcagctacttgaaaagagtcaatgggcttgagtggaaaagaaaatagagacagcagggtcatcggtcacattggcaagggggcatgaaaagggagtggagaggctttgagatcttacttttctttcgttctaggctcttagtggaagaattaaatcagcctgcagaagagactgaaatgaggcacctcttgtcacagtcaaggcagaagcggaaacggaggccgagactgcgcaggcgcagaggaggctagcgttccttgctgcctcgccccgcggcctctaggagacaggggccacggggagagcacagccacccggcgcgaagagccctctgtaccccgcttcctcttgaggccctcggaccgtccaggaaatgtctgggagcccgcctgcggagggcatagcgccgaccctcgctccccgcccaggacccgaatgaacctggagagcggatgccagcagtggccgaggcgctaggacaggaaggaccgccagacctctcaagatcagccttcctcgccaccgttctcacctctttgtccgctgccttctcctcaatgcctagcagcgcgtacaggtccatctgtaagagctccttggtcactgccatggttccggcctgacggattcgtactacaactcccaagagtctaagcgcgcgtgaggactgcaggctccgagcggcgcctagccctctgggaattgtgttctgggtcaggcttgactgactctgagggaggccggcagtcgtgaatgaactacgactcccagcagcccccgttgccgccgctgccgtacgctggctgcaggagagcgtccggattccctgctctaggtcgcggcgggacagtgccagtgggcgtgtggggcggggcagggcagggaagggaagggcggagctggggtgagggtccaaggggcccaggacttggccggcgtgatctcagctctgcagaccctgcggtgctgggagccaccatggagagtaggtgctacggctgcgctgtcaagttcaccctcttcaagaaggaggcgagtcttccctccccgagggctgcagggccagggaggagaggagggaaaagcgcgggacttaacgtccaaagacttggtcttacggctcctttccagctgtgtggttttgatgaagtcattgatcctcagtttccatttctgtaaaatggggctaacattctctcgctttcagggtttatgtgagggtccactgaagtgctttaggtgagagttccctataaactgtaaagcgcgctgccgtcgtttttgcaaagctactcttttctgtcggcccagtgtagcatctggcggttttcttctctccaccctgctcctccgaagcgcggtgtccatcacaccaagcccgttactccctctgctctgaaatcttccccatcccgcagcctgcccttctccaggtcgctggagttagattaccacacttcctcctgcttccggggcaccatggtgaaggctgactgtcctgtccctatcacagacctgccagattcctctggtaaactgcaggttccctctgcctcagttgtggccagggattctgaccaggagatgatgggaactagatggagtaaattagtgtcacgcaggaaggcaggaccgtgcagcattcaccaacctggattttggagtcagcgttcaaatctgagctctgctgtcttattgaggcggtgaccttggtttggataagttatgtaacctctctggccctctcaaaataaggataatcacggttggcatcaagattaagtaaaataatgtgtgtaaattgtaaggaataaatcacatgatgaatgttaagtactgggtttagtgcctggcacatagtaagtgcttaataaatggaggctattgttagcccatcctgagccaagcctccctccatctctgcaagagcagaggaggcatcggctctgccctgtctctctgattctcctttgtggaagagtcagtggcctgaaatactgggctttatctatctgtcttctacatccctgggtcagggaattgaagacagggtagaaagcatgggaattttgtataaaccttcatttggcttgaataaggtactggaaaccgaggaattgctttactcaccatccctaggcc

SEQ ID NO: 164 - DNA, 31458 bp, Homo sapiens
  source 1..31458: mol_type = genomic DNA
agtctcgcactgacgcccgggctggagggcagtggtgcgatctcggctcaccgcaacctctgcctcccaggttcaagcgattctcctgcctcagcctccagagtagctgggattacaggtgcccgccaccatgcccagctaattttttgtatttttagtagagacagggtttcactatgttggccaggctggtctcgaatgcctgaccccgtgatccacccacctcggcctcccaaagcgctggaattacaggtgtgaaccactgcacccggctggtgaatgaacactttaacaataaagtttgattaaaaatttaagaaattacaggtgccctcgatagacaatggatcaactggaaactaaaaagccagataattttgcatcttaaattgaccctgaaatgaactgagtaagtccagttcttttccatttacaactggttattggtttaaaaagcagccaaagactccagttgagaaaaactaagtaattggatatattttaatacataaaatgttacacttgttaaatgttactgaccatagctttctcatccctgcttatgatccttgttggcttttattttctaacattctttaggctgcaggtaacagaaagcaaactccaactaaactgaagcagtaaacaagtggaaggactccgaggtggctgacgagcttgacaaacaagctcacgggccctccctcaaggactagaaggcaaggctgaaaaccatcaggactctgcctctcgctggatgtctgcttcattctcaattttttcccatgaggttggaatcaaggttgtcagccatcactgggacttcttcctttcctgagagaaagtatcttcctagcttcagttggagagatcctagggaaggacacctatgtgacctatttggggtcacattcctgtcctgtggactggtgtctgtgaccagggaggaaagatgggaaagaacttgaactttgaggccgggcgcaatggctcagcagtggctcacgcctgtaatcccagcactttgggaggccaaggcaggtggatcacgaggtcaggagatcgagaccagcctggccaacatggctaaaattacaaaaatctactaaaaatacaaaaattagccaggtatggtggcgggcacctgtaatcccagctaatcgggaggctgaggcaggagaattgcttgaacccaggaggtagaggttgcagtgagctgagatcacaccactgcactccagcctgggtgacaagagtgagactccatctcaaaaaaaaaaaaaaaaaaaaagaaaaaagaccttgaacattttgaacgtctcccccttagaccatgttagtaggatgaagaggacagagtagctcccctgaaagaggggtgggccattctcaggaatgtcttactgagggtcacagtcggtgaggaactggattggcatctagcttagtatgttttccattaaagaccagtgtttccacaaataaatgcagcccacagaccggtgtttgatacttggctttactttataaaaatacacaacttaaatacatatgacactctgtttacaagacataaactggtagatttaacattttcagttatttcaacagaaagaaaatatgtaaattaccttgtaagagcaaagagttcatttatagactctgctttcacagttaagggggaagaacgcccaggggcaatcaatgcaggaagctaaccaacactgtccagctctccagcaaaactcatcttgccaacagggcctctattgcaccgcctaatattgcactgctcgttagacaccatctcacttatccatgtcaccagtgtaagcttttgtcttctctagaaaagtttaatggaaaaaaacgatgtacaaacagtaaaactgtatcttacaattgtgctaaataccaattatgagaagtacgaacctctcttcactttgcaaagcttgcaatggaaagtggttagctatattttgcagctaagttcattttcaaaagttttacaaaacctttgattcagagtaagcttgatggggtacagtggcaaaggaggtgacattcccatgcctagtggaattagttgtaagacgcgcactgtcactgtcaaaggcaacaagcacatggcttacagctccacctttctaacttttggcaaaatccctcccttccccttgtgatgttgtcattgttcaatggggcacagctccttttttttttttttcttttttttaaaaaactgattcagagcttgcagtggctgcttacttactctggctatctttcagaaatttagctgccttatctatagctcatttaactaacagtgaattaggtactagtttataggtataaagaaatagttacttagttgagaattcaatatatgagaacatactagagtaagtttcctgaggtaaaagtatgccttaaagaatgatgtgcaatctataaaactgtagcattttctcttgggtagcaacacaatgacccccaagtctggatttttaaattaacaggctaagaaaactaaggacacattgatatagagaaataaaataacaatgctgaagtcaaagaaatattgacagctgagatatcaattcaaaaggaggcatgaaggggaacagaggaacagaaggaggctgtattttaaagtgcttaggtaggttagaagatgaatttgaaatgcctccagggatttctaacaagtttaaaaagtgttacttcttggtgactcagatgttgaagacatggcttttctttaataatagctattcaaactttttattcttttttgaaaaacaagattctctataaaaacgttttagccattgtaattattctgctagctgttactctcactaatgtattttgaaatcctaactggctgaagaatttttaataaggttgaactacaaagcacacatttgcaccaagaatttaaattaatgcatagatgtctgtgaaattctgcatgaagttagtgccaaaaaaacctttccattgcagatcatgctttatttcttaatattctgctgaaggattatagaaatcagaaaaattctaggaccctgaagcttaacttgcttattttattccttttacgtaaatgaagtggtatatggccattcttaacattaataatgaaggtgttggaaactgagtctcaagacctaagaatcaagctcaggctaaatttcaccaactcacacataaggatatgagtgggagcactaatgaattttctctgctgtaattgctcatctgtgcaatacggctgaatgaggttcccaatctagtatttaataacagtgatgaaaactggcaccagctttcatagagggccacacattcagagttgtcgtgtcaattcgggctgacgctaccgtgcacgatccctcattcatatgacttctacattctgctgtgaggacagacatgtctgagtgctttcagcatgataaaggccttccttaagcaaaatttaggtcccgaagaactctgggttggagttctgtagcctcagaagccagttaaaggccagaggaaaacctcgcaagaaataacatatatcaatcagttcatttaaaaagttgttttgatattaccaagatgaaaagtgcgatgataaagcaacgctctggtttcctgaagacaagctcagtgcagcccaagtacaggcatacagtgaaaagctgctgtgtggaaaatccacaaggctgcagtgggcttggattggaagaaagtggcttttcttcttaggaggtaaggtagatgctctttggcaatcgatatgggatagctttttaaaattcacaggacaggaagattttatatactttcaagccccaattagtacagctaattgaaagtatataaaaatgtgaattagtgtggttgcagctaaaagtatgagtgatgtaacaagaatgacgacgtaatgagtcaagtggtgagactagttctataagcaccgtaaggagtgccagtcctaatacatgaacttcatccatcccttgtatatcaaggaggagactgtggtcagagaatgtattttgtaagctatagtttaaaaatattactcttcagaaatttggagcccaagcaggaattacagagattcctcccaacagaggccctgagatctcccctgactgccacccaaaggatccacacttgcctctgatcaaccagattcaggccaaggcttagaagagggaggaggcagtggccagaagccagggactctagaggagagaaatgatggcagatgtggggttcagaaaaaacacaagacgggaaggggaagaggggaaaaaaggaagaaacaacactggtgaggaagtgtagaagaggccaactttgctgaggagtggccctgcctttctcacctgcctgtggcaaaggctggcagtaagacaagggctaagcctcataaggagtctctcctactgcatcaagcttgccccaagcttggctggcctttcctctgctgatgtgcataatctttaagtgcgacctctaagtaccttttttttttttctttaagagacaagatcttactatgttgcccaggtgggacttgagctcctgggcttaagcaatcctcctgtctcagcctcctgagtagctgggactacaggcggatactactgcagctggctcctccaagtacttctgtcttggggcctgattcctcattcccaggtgcacagtgctctctactgctaccagcaaccatttctatggcaagggaaaggcctcagatccagggacaggataggcagcagccagtgtacctagaatttgtggctgccaccaccttttctcttaggactggcttgtctctcccactggtggctgcagaagaggaacagagtgaatatcataaaggaatgctcaattcagaactgtatcacctcattttacaaactcccaaagggctgccaagagtcatcattatagatcgatgggttaaaataccacctaaggaactcattgtaaaagcagcaacttgtctgtaaggtcacaccaaacttacaggggttctgatgttgtttgcttccatttttgttattttcttctctgatgatgaattccgtaaaaaagaaaaagtgaaagggtcctcttgtcctctcttccctcctccaggaaccttgtggatttccccaagtgaaatgtctaagtgatactataattacagagctgacgaatgagaaaaaaattcagaattatctagaaatatgaaatgaagtacagggtgtgacgctcagttcacttcatacaaatgcaggtcatttctcagtaaaatgtctatgaaatgggtacctgaattactgatatacaaatgacaacacatgaatgaaaagagcagtgagattctgggaaggaaaactccacgttggttatttcacctctagggaaagtctgtttgcatttgagtcccacatgtggcttttttctgtactttctacttgatgtttttcaggagggctgtccgagcattcacaactgctttgaaggcatcttcactgccaggtgctacacatttgtcagggtgaagaagcacagcaagtttccgatacgctttattgacttcatccctgggaaaagaagccaagatctatgttagtaacagagtcagcccaacccactgcatgttagctgtttggacacacatagtatctcttacagtgaacatatcctaaattattaccctttctcaaaggcaggattaaaggactagaaaacagacaaccaaccaataaatagtatgtaatatataacacaaattgaaaaagttattattgcacaatgcaaaaagtatataaatgctaacaaaacacttagtaaaataataatcagatgaaaacaggcagtacttggcacctcacaggcactcagcatatctttgctgattgaaagaataagggcttgggcaccagggaaggcatccagagttgccttctgaaagaaggggttctgggagagaaccaacagtggcctggaatggagcccgaacacagcacagacgggaagcaaaacaaccccaacacctgggcctgataaacaatcacaacagtaggtgtttcatgacaagtgtgtgctgggaaaactgtttcttgaagttaggatacaggaggttgttacataacccaggcatgagtgagtacaagtttagattaaggtatttatggaaggaaacaagggaagataaaagataaagaaagaaatggcagaagtggatgatgagctgaatatccaggaggagaagatgaaaagaaaggggctgaaatgagctccagggtcaaggtcacgaggaatctgaggcccaagaaggtgacaccactgagcaagcaagggatgctggaaaggggtagtccagaatgacaatgagctcacgagaccaaagaagaaacacgacagagatcagtattatccagagaggaaaggagcagtagcagtgcttctccaatccggcggttccgataaaccagcagcgctccaggagagagctgcaggcttctgagctcctcaaagagccaaaactggctggggaggggcctggacccatctgtccctgtccccactggtcatcatcctctggtgtcaggcctcccagagggctctaagtacccagccactccccagtcagattaagctctgtctctaccagatggttttatttcccaccttccttttctaattcagggttccagtgatcctataagctatatggtgctttaccaaatgccctagcctttctcctttatttttatcgaaggatttctaatgtggctctccaagtcagatggcctttgataccttggctatgatggaaagttttatgtatcagcttggagagactgaggtcatagggtcatgttaacagttctccaagtcttaggcgtacattctagggccttttctgctttctgctcttagaggggtcctgaattttcttgttctagcaagaacctccttctttcataaggatactctgggggaccttcctggtgccctgcgtgttgtttttctacatgtgtaattctgataattcgctaacaagaatgacattctccctctctgaagcaatttgaattgtaagaattcttatttgtcccaaagaccccgtgtccttgaggaaggtacagcatcctccctcttccccacaagggagtcctgggaagggcccttccagccactctgcctccccagagagggtgtccacatggggtcagtagttacacccggtcctctgcactaagagtgcctttcaagatttgcaggtagcgggagaaactctcaagatgtaacaaatacatcaattccgttgaagacgaagattttcttaaagttcaagaacagtaaacacagttaacagtcaacaaataccaaaactctctgtaacttaagaaaaaaatgttttaaggctttttcccaaatgtacttagtgccatataaaattagtttgctaggcccagtggaataaaggtaagagaagcacatgtttctattggttaaggatatgaaacctataggggcctgtaagttctggtaaatttcaattaaccaaagtgaatacataaggagccctaagtttcttctttcttaatgaatattgttctaagtctactaacaagtagataaagtaattgtttcttaagtttagagccagtatcccttggagatgacacagaagaattcagaaagagactatgaaggcctaaaaagaaatgtaaaatatacagatatacagattcagtgcaatcttactgaaaccctactggcttttttttttttcataaatggagaagctgatcttaaaatatatatggaattacaacagatccttaatagtcaaataatcttgaaaaaaaataggaagactcacattttcgaatttcaaaacccactaaaaatctacaataaaccaaagagtatagcactgaaaaaaaaaaaaagatcccgataaactctgtgccctacacgaggtcatctgaattccctgacagttttaaagcatcctcaatatcacctggtgaatgagtgtgcccaataacagttttccccttcccttccccgctttccttctggacttgaagatacgctgtgaggtcagaatggagaagagatgtgtagtgctttgggtgctgacatggcaatttcaagacatacttttttcttttgtgagaatcaaggtgaaaaagtaggaagggtgaagtatgtggggggagtctgggcgcatattgtactacactacaatatgtgtagtaacggtagaattagaccgttgaaagttacataaccataatgaataataatttaatttttgtacaagcaacaaagaatagtgattgaatttttttcttaaataactcttttgactaaaataattaacataaatacacacacagagggctgggtgtggtggctcacgcccgtaatcccagtagtttgggaggctgaggcagttggatcacctgaggccaggagttcaagaccagcctggccaacatggcaaaaccccatctctactaaacatataaaaattagccgggcgtggtggcgtgtgcctgtaatcccagctactcaggaggctgaggcaggagtattgcttgaacccaggaggcagaggtttcagtgagctgagatcacgccactgcactccagccggggtgataagagtgagactctgtctcaaaaataaaaataaaaaaaaaaaataaacaaatacacacacagatgaggaacttgcagggctttagagacaaagacagagacagtcaaacatacagtgttccagggtaagaaccaattataccactaactccggggattcttgaacatgtttaatctcactgaatcccagttttcccacctataaaatgaaatgtttgacaagttgattgccaacgtgctttcctcctctaacattctatgattgaagaattctcttttgttagttcttttcaaagctcttcttgttccagacagatgaaagcagagcataccatttcatgaagtatttatgcacgtacacgacacagttttctcaccaggcaactgtgccctctattttgtctctttggtattcagctaattcagtgaaactgagtcattctaatatattttcatacatcttcgtatttccagccaactggaggaagatatactgcacctataattttggtgatggagtctttctttatgatagcaatcagcactaagtatcccagagcgcttaccttgaggccccaggtttgactcccagcatgtcccaactgtctttactatttcgaattctgcgaatggcatctgcttgttctttggtgaaactagcactgctattggtggtagggcgtttcccgccattttcacataaatcaactatggatatataaaaggtctacaagaagaaaacataacccagggtagaaatgattttgtgaaaataggaattccttttaagcatcaacttaaaagacttttaatatattccagcaactcttagaagtcatgtataaagcaaatacacactttggaagatttttttcttttatactatttaaatatatatattcatatattttaatacacaaaaagtataaggaataaaattaaagtggctaataatcctactttcagataaccacaattgaagttaaaaagtaacagatgggcagggcatggtggctcacacctgtaatcccagcattttgggaggccgaggcaggcggattgcttgagctcaggagtttgagaccagcctgggcaacatggcaaacccacgtctccacacacacaaaaaatacaaaaattacccgagtgtggtggtgcacgcctgtagtctcagatacttgggtggctgaggtcggaggatgcttgagcccaggaagtgaaggctgcagtgagcccagatcatgccactgtactccagcctgggtgacagagccagaccctgtctcaaaaacaaaccaaccaaccaaaacaacaaaagtaatgatgaacattgttagaaaaattcaaatagtaaagaaaagtgtaaaatgaaaactgtgtctctctactcctcaagttcctctcctggaggtaaccattgttaattttttttgagcatccttccagaaaaatttaccatcagtatgccagtatatacacagatccatactctttcaacatgtactaaaggagatcagactaaacacatcttagcaccttgtatttttttccacataatgcatcctggaatctttctatagctacatgtagagactttctttgttcttctaaatgactgttcagtattgtattgtgtagctgtcccataatttgtgtaaccaactctctattcttggacaagtcagttgtttctagtttttttgctactataaacagtgcttcagtaaatttttcttttgtgtatacatctcagtacacttgtggggatactgctttaggataaattcctaaaagcagaactgttgagaaagagtatatgcgcattttaatttttgagtctgacaaccgttgttaaaaaaaaaagctgtaccagtttacattcccatcaccgtgtgtgtgagacagagtgcctacttctccataccctcattaacactgaccattatcaaacatcttaagtgttactaatctgatatatatctaatatagtttgatttgcatttctttaattagaagtgaaagtgggtatctttccaaatgcttatggccttttctttttctgcaaacttcttattctttgcccatttttacaattttttttcttttttttgagacagggtctctctatgttggccaggctggtctcaaactccttggctcaagtgatcctgtctcagcctcctgagcagctgggattacaggtatgtgccactgcacctggctacacttttctgatttttttttaggtgaaagcttttttgaccctgctcatgtttcatgttctgtgcactgtaattattattgaataatactcatttaccacactacagccacttttaaatggacatatctcctcctaatttctttaaaaatcttttcctcttcttttttggattcttttatagttcctgttatcttctaaaattcttatctttcttttagactctcctttctgatgtctagtattagctaatcaacttggtaacctaacaagaagccttgacgtctgaaaaggggtgtcaaaggaataccactagagaccaagacacaagacgtattagcttggctttagtctgtcttaatattgctctctctgttaacagttatcaatcagataaaaccatgttacttcctgacataaaatgtctattaagtagatgggaaataaagaaaatatttattaaattgaaccagcaggaaagcactacttttaagtacttacttatagaatactgtaattattctcttcttgttagctttttttttttaaacagactaatttatccattagttctatccaagatgtatctaaaaagataaaagccacataaaagggatcacagttcacggatgtttgctagttgtgtatcagtaagactgtcttctagcctacgagttaacctgaaatatgaatattcatagatttctgagggcacaaggattcattcatcacacacatggttataggagacaagtcatagtgtaggctatagaatactaggattgagaccaaagcctgtttaaatttcatgtctgagttccagccatgacagagtaatgaatactggactagacttcctgccatcaactactatcgaactggaaaaaaactgttggcagtggacaacagcaagtgcaagacggctccctgagagataagccccccaatcacctggttgtctgcttggagtccatttcctgaccacatcacagagagctggagtctgagcagacacaagtctcattgagctaaggaggaggtggctagactctgcagagcaggccattggagaggagagagctgtgcagagctgggcaccaagtccatatgggggtctctcatgagtctgtggccaaaggctgggctatatatgcatagggtgagatcactcaaggcttaccagataacagctgctatggggttgagaacaaaaccaatatcctgaggtctagtggtgctagagaagagctatcctgggaacagtagggtttagccttgtcagagtggagatattgccttaacccctcattaattgccccaccatctactgaggcaccacagaaaggctgtgccctaaaaattatagactcatcctaacaaaacctaaaaccaagagctgacaagatctgcaaaagagacagaatttggaagctgagtcctgccaaattagaagggcttgggaaacactttgaacttccttcaaatccttgctattagggcaaaaaaacaagccaacacaagttcactgtaatttgccaataattaaactgcctcctgaggaatcaaaaatcaacactaaacattcttcaatcaagaatcaatagtcaggctgggtgcggtggctcatgcctgtaatcccagcactgtgggaggccgaggcgggcggatcacgagatcacgagatcgagaccatcctggctaactcggtgaaaccctgtctctactaaaaatacaaaaaattagccgggcatggtggcgggcacctgtaatccagctactcaggaggctgaggcaggagaatggcatgaacccaggaggcggagcttgccatgagccgagattgcgccactgcactccagcctgggcaacagagccagactccgtctcaaaaaaagaaaaaaaaaccaacggtcttctgaggaagataaaagaatctagagtctctacaatgtgttatccacaaggtctggtgttcaatcaaaaaccactactcatacaaagaaacatgtaaatgtgatccatagtcaggaaaaaaggtagtaaatagaaactgaacccaagatggttcaaatgttggacttagcagatgaagactgtaaaacagctattataaatatttcaaagaggtaaagaaaaatacattcaaagaattaaaggaaaatatactcttaatgagtgagcagagaatctaatagagaactgagaactatactgggaaccaaatgcaaattctagagctgaaaacttccctcagggagtttaacagtagattgtcagtggtgaagtcaaatcaacagagactatgcaatctgaaaaatgcataaaaaaatggaagaaaaataaatatagcctcagggactctgggacaaaatcaaatggtctaatatacatgtaattggaggccaagaaggtaaagagagccagaatgtggccaaaaaaactctgaagaaataatagtaaaacaaaaacaaaacagaaaactccccaaatttgatgaaaaacacccacctaccaatcttagaaactcagtaaatcctaaatagaataaaaatgaagagaatcacatcttggcacatcatattctaactgctgaaaaccaaagaaaagagaaactcttgaaagcagccagggggtaaaaagggcacattaggtacagagattaataagagtcagaatgagtgctaacatctcatgacacacaatggaggccagaagagaatggaccagcatctttaaagtgttgaaaaaaatctcatttctaacaagtatgtcccttggacaaatcactttactacccttagatgctctcatatatgaaatgataacaatacttgccacacattgttgctgtaagtctccatgagatgaaatgtgtaaaattctccagaatggtgaagtactattcaaatggttaggtatcattattgtacacatacaggcacaaagtcacatagctccaagtactcaaaagaatagaaagcatggcaaaccagcatcaactttatttgatcttgaaatagaaaatacttttgcttaattcagcctgtcagccaaggaagaaatctgtcttctagcaggaggagtgacatcttgtgagaaggaaattcagcataaaagattaagtacaatcccactcaataattaagaacaactctttatagtgtaactactttatttgaaatgctaaaaattcccaaaatatcagatatattcataagaagaaaactacattattcatgctaccacttacttccaaatgtatctataattaagggctgactttataagttattgttttaaatagcctatttcccttaaaattactcaagatgagtaggtttttttaaagtggccatctgttcaggttgtgatgtgagcgcctccctctatttcctgcttgattggcgaggccttatttttatgtgtgactggatggagtctatactgacagtctcctattctctaactgcacccctgtgggctacaatataggattatactagcggtggcaaggcaattttgccacagtaatgcttctatctgattatgcatataaatgtaataccattagccaaaggtagctttgaagaaaatctctgtcctgcttaagcagtgtataataacttttgttaaacttgatgatcttcagaatcgcctggagagagagctttttcaaaatatagattcctgggctccatcgcaacataagcttccagtaggtctgaagcctagaagtatgtattttaagaatttcctcaggtaattctggtgatcagctaagtctcatctaaaatagacagcagtcagatcactcattctcattctctcttcctttctctccccctttctctatttctatctcactagattctttgaaaagaaagagcttattctaatgagaaattcctattacttttttgcttcctataatttaaactgaaaattggcacagtggccttgacacaaaccttaaaacaacaaaatgctagcttacctggaacatctcattaatgccttctccagtttgtgctgaagtttcaaagtacaggaaccctttgctttcagcccaaagacgtccttcactttcatctacacagcgatgtttggtacaatcaatctgaaatagaaggggcgggggacagagagaagattacaatcttgtcctactagaatggacccagtgagggtctctgtcaatcctttactaaggcaaagctattcttagtaaatgcctgcactagtgtgtaaaattaccaggaccaaagggacagaaacaaaacttaatattgaatgtagactgatattctatggcaacaggactagtgcctgctgctgcaatgtcccacctgatcccttgggaaaacagctgttactcagttctgtgaaagttggcttcatgacatctgccatacccttggggccatagtctgcttttcacacctttccatagtccacatcacctaattaatgcccctactccagtcgggtcagagtctgattattaggaaccattgctcccactcagtcaccaacatccttccccatgtatggcaccagaaaaaaaaaaatgtatacaaattttgatatagcaggttttaggctgctgtgttgttttgtttttgtcttagggacattatgttttgaaaggttattgatttccatattacacaataaggaatttttcttttctttttgtttcccaacactcaaagctccactctttccctagaaatctgaacacaccatttccagaggggttaccttgttggcacaaactacaaatataatattttccatgtttccatgaggtccaagctcttgcttcatttctgccagccacgcatcaagggcgtcaaaggagtctttctgcccaacatcatagaccagtatcacaccctgtgtgtccttgtaaaactcatttcgaaccttcaaataaaaggacagatacacaaaacgtagtttttgtgatgttataagaatgtatctcacagtcattaacctggcaaagtgtgttcttttgtgtattcttagtgtttgctattgtatctgtttctactggtcattagagggttttttatagaatcaaagtaatgtcattctaaaaatgtattagcatagaaggacttacaatggaaaacaacagcctcctgccccaccccgtcccacctccagttccactccctagaggcaatcagtctttaattatagtagaccttaaaagaacatcaattatataaagttcttcttaggaagaattaggaaggtgagtgagcaattcaaaagaacttaaggccaaaatgacataagtgtcagcaatgggtacagccatttataaatcacatcccaaagctggcttcccccagggtgctaggcagagcttccctgactctcgggtctgcacaccaactttagaactccaaactcagagcctcagtgtgatacaatggaaaagagcacaggctctggagtcagacagatctgggttcacacttacttactagttttgtgatcttgggcaagtcacttaacctctctgcgtctcagtttcctcatctgtaaaatggggataatactacttacttcacagggttattatgatggttaaatgagataatgcaggcaaagtacttagcatggtgcctgaaaaacaatgtctatttaacaccttccccttccttccttgcattcattctctgggcttcattccaaatgtgggaagaggcagcatgaaatatgggcatactcaaacattagggccagagagaagttaaggagcagcattgacacatggggtttccgggacaaagttccagaaagaatcctgacagagcccatatattatatgttcttttcacaaaattcccaaatgtactcagacccacacaagctatgtagtaagaaatgaaaacatgttatacacatcgggtagggtttctgggcataggcagatatctggaccaaggatattaagtgctcctatttgtttacagaaacctaagaagctatcccctaaagttaaaaccaacaaaatcagaaagaactgaagatgatgaagcccaccagtcctttccctcagtactcatggtccttggcccttctacagcagttaacgacgggctctctcttcttttctaaaactctcactgccttggctcccatacatcacattccctaggctcttaaattctctttcaccaactccccttctctctattgctcccactccagcttaccaccaaaatcccccaaatcctgtcctatgccttcttcctttcgttttgaatccttcctcccaaatcagcaacatcaaccacttgtacagtttcaactgtgagaatctccaagatgagccctctcctctgaggttccagacctgcatttctaattagcacaacattcttccagctgaatgtcctgttggaatctcaaattcaatatgcacacaggaaacccctcaacttcttccttcttaaactattctccaaagttccaactttctcaaatgatgttaaaagtttctgatcagtcctccaccaaccttcccagtcttatcctcccactagctcctgaccttcaaactggggaatctctcattccccaaacttgcccaagccttcctaactccatctggaaacagatacctctttatctttaattgttcaagccctggctataatgctgtatctttcatgcagctttctctgttccattcctcaccatccagccccctactcctgcaaaacagaatgtaatctctatgtcccctggagtaccatactgttttgtactttcatagtgccatcacttcctgcccagttttacagttagtagcatatccagctgtcttccctcctacactagaagaaatgtgaagacatgcatcatcttcatgtatcctcccttgtgtcacccacagggcctagcagatgcaggcacacctcactttattgcacctatgtaaggcacataggcacacctcactttattgcacagtatgtacatattgtgtttttttacaaagtgaagatctgtggcaaccctaagtcaagcaagtctattgatgccatttttccacagtgtgtgttcactttatgtgtgtgtcacattttggtaacacttataatacttcaaacttttcatcattattatgtctgttacgatcatctgtgatcagtgatatctgttactattttaagtgttttgggataccatgaacatataaggtcatttaagacagcaaacttaataaatgttgtctatattctgactgttccaccaaatggctgttgccccatctctctcccactcctggagccttcctcttccctgagacaaaacaatattgaaagtaggccaattaataacaatacaacggcctctaagtgttcaagtaaaaggaagagtcatgtatctctcattttaaatcaaaacctttaaatgattaagcttagtgaggaaggcatttcaaaaacagataggccaaaagctgggccttttgtaccaaacagctagccaagttatgaatgcaaaggaaaacttcttgaatgaaattaaaaatgctaatctagtgaacacatgaatgctaagaaagtgagacagcatattgctgatatggagaaagcgttagtggtctggatagaagtccaaaccagccacaaccttctcttaagccaaaacctaatgcacagcaagtctctaactctcttcatttccatgaaggctgagagagatgaggaagctgcagaggaaaagtcagaagctagcagttgttggttcatgaggtttagggaaagaagccatcttcgtaacataaaagggcaacatgaagcagcacatgctgatgtagtgctgcaagttattcaaaatatctagctaagatcattgatgaaggtggctaatcaaagcaacagattttcaatgcagatgaaacaggcttggaatagatagatctaatggaagaagatgatatctaggactttcaaggctagagaggaaaagtcgatgcctggcttcaaaagcttcaaaggacaggctgactctcttgttacgggctgacagagctgttacgggctatatgagctgatgctcatttgccataatgaaaatcctagggcccttaagaattatgctaaatctactctgcctgtgctctataaatggaacagcaaggtctggatgacagcagatctgtttaagcatagtttactgaatattttaagcccactactgagacctactactcagaaaaaaggattcctttcaaaatattactgctcattcacaatgcacctaattacccaagagttctgatggagaaatacgaagagattaaagctgtttttattatgcctgctaacacaacatccattctgcaacccatggatcaaggaataattttgactttgaagtcttactgtttaaaaaatacattttgcaaggctacagctgccatagtgattactctaggcaaagcaaattgaaaaccttgtagaaagcattcgccattctagatgccattaagaacattcgtgattcaggggagaggtcaaagtatcaaccttaacaagagtttggaagttgattccaacccttacagataactctgtgggagttcaagacatcagtggaggaagtaactgcagatgtggtggaaataggaagagaactagaattagaagtagggcctgaagatgtgactgaattactgcagtctcacgataaaaaataaataaggagttgcttcatatcaatgagcaaagaaagtggtttcttgagatggaatctactcctagtgaagatgctatgaacattcttgaaatgacaagcaagaatttagagtattacataaacttagttgataaggcagcagcagagtttaactgaattgactccaattttgaatgaagttctaatgtgggtgaaaatgctgtcaaatagcattgcatggtacagagaaatctttcatgaaaggaagagtcaatcaatgtgccaaactttattgttgtcttattttaagaaactgccacatcaaccaccaccctcatcagtcagcagccatcatcaccgaggcagcctctgatcacaatggaatcaaactagaaatcagtaacagaaggattaacaggaaaatctcctaacacttggaaactaaacaacatactttttttcttttgtttttttttgtgttttttgtttgtttgtttgtttttgaataacacactctcttttttgagatggagtttcactctttcacccaggctggagtgaagtggcacgattttggatccctgcaacctccgcctgttcaagcgattctcctacctcagcctcccaggaagctgggattacagggatgtgccaccacacccggctgatttttgtgtttttagtagagacagggtttccccatgttggccaggctggtctcgaattcctgacctcaggtgatccacccttctcggcctcccaaagtgctgggattacagacgtgagctactgctcccggcctgaataacacacttctaaataactcatacatcaaacagaaagtctcaagggaaattaaagaaatacattgaactgaatgaaaatgaaaatacaacatctcagaatttgtgggacacacagttgtgctgagagggaaatatgtagcattaaatgaatttattaaaaaaggaaaaagtctcaaatcaataatctaagatcccacctcaagaatctaaaacaaaaagagcaaaataagcttaaagcaagcagagagaaggaaatgataaagattaaggcagaagtgaaacggccaaaccagaaaagagcaaaaaacctccttaagaaaaatgaaaaagcccaaggaaggaaaaacaaaagagaatggtcatgagattcatttggtgattacttagagctggtaagcagatgaaaataaatcaagtagttgctttagcttcttctctggaaagaatgcagatgactaggcatgaataggaacgatcaccccagtaccctgctgtgaaagaagtcgcatcactgagttcttaagcccaagcataaatgtaattattttttttttcacattttaggctaaagtatgaggtaaaaagcaaaagtcctctgaaagtcaaaatgtcttattgaaatgtttgaaatattggcaatgaaatttcctaccactatttaacaggataacctaaaagatcaacagttgtctattaactcaaggctctgaaggcaagccacgatcaagctaaaattatgcaattttacacatgatatcaatattggttgtttcatataattctggatctctccccaaaccaccaacaatactggatataggttttgtcaaaaaggctttcttacctcatagaagaagggatgtccagccatatcaaagatgttaactttgatttctctgtctctgacgtgtaccctgaaatgttcaaatggaaacaatccgaaagaaagtcatggtttctccatttaccttaatatcatttataaatttcaaaaggatatgtgtatgcaatttaagaagctttcttagtgcctcttcctcattccagatcatctttacaatagcagtcagcaacctgacagatgatcctgccttcttatcccaagaacactgaacccacatggagtaggcattctcaattacttcactttcaccttcacttctagaaactttggtccacagctcccaaccaacaaagggtagctattactatggtattaagaaaaattgatttgggataagtaggagcaagatgaaggaaaatgaaaagttttatttcacttagtaagagacatcttaattaccactggttatatttggttatcacacagcagaataacaacgatgtatattaatgacgtctgtttaattttcttgtgatctttatttgagcaagagcaatagtgaatttgttttcagatatttggaaataaagaataaaaccaaaggggaaacaataaccattcatattagaattaactactgttaacatcatagcatatttgttcctagtcttttttttcatgaaaaatcaccattggaaaatgataaaggaacattagaaataattcaaacactaggccggacacggtggctcacgcctgtaatcccagcactgtgggaggccgagatgggcggatcatgaggtcaggagatcgagaccatcctggctaacatagtgaaaccccgtccctactaaaaaaataaaaaaaattagccgggcgtggtggtgggcacctgtagtcccagctactcaggaggctgaggcaggagaatggcatgaacccgggaggtggagcttgcagtgagccgagatcacgccactgcactccaacctgggcgactgagtaagactccgtctcaaaaaaaaaaaaaaaagaaaaataaataattcaaacacaaaagaaaaacacaaagatgaatgtttaaaagttattccaggccaacaggtagagagggagagagatgtagtgaaatgacctatctatattccctatgattccagccatctctgaggcccagctgcatccttgttgctagattatgtgaactgattaatatccattttcttttattttgcttaagttggtttgaaataggtttctgtcaattatatcctcctgactcatcatgggacaaacatctcttccaaaaaaatttctgccagaaacaaaatagtctgttgactataccatggtcctttggcataatatggtaattctcacatcttagataaataaactagctacttatatgaattcagaacaaaactatcttaaataggatgtcctactatatcactgatgaaatcctatgctttgaagcaggaaagaggaaaagaaaactagaaagaaaggtaaatttcaggctggacgcggtggctcacacctgtaatccgaacactttgggaggccgaggtggacggatcacgaggtcaggagtttgagaccagcctggccaacatggtgaaaccctgtctctactaagaatacaaaaattagctgggcgtggtgacatgtgcctgtaatcccagctacttgggaggctgaggcaggagaatcgcttaaacccgggaggcggaagttgcagcaagctgaggttgcagtgagccaagatcgcgccactgcactccagcctgagcgacaagagcgaaactctgtctcagggaaaagaaaaaaaaaagaatgtgaatttcatttttatttttatttatttttgaggagtctcactctgttgcccaggctggagtgcagtggcataatcttggctcactgcaacctccgcctccggggttcaagtgattctcccacctcagcctcccaagtagttgggattataggcaactgccaccacgtccggctaatttttgtatttttagtagagatagggtttcaccatgttggccaggctggtctcaaactcctggcctcaggtgatctgcctgccttggcctcccaaagtgctaggattacaggcatgagccaccgtgccaagccagaaatgtgaatttcaaatgaagagcttcatacatttcactgccaagagctacaattttcattctttaaagaaaatttgcagaaataccctctgctgctgtcagttgaaaaatggtgctgtaagagcattacacacaactcttgagttttactctaccatttactggggccactttaaaaagccatgaaggatacatctgaacttgactccactcttcacctaatcgacattctgctagctatatgtcaaaactttagtctaccttcttaaatattgccctcatagtctaatctggcaaacttcctctttagatgtacctatcttacctaacaataaatatttattgagtacctattaggtataagcactatgccaggcacttggagaaaatttatactaataaattttcagggagtttataatctagcaggagacattacacatatacaaataataacaatacaaggcaatttttggtaagtaccataaataccatagacaactttaggatttctgtcatttgcaaccaaaaagagtcctgaccaataaagggcatgtttagaagaccttacgggaacaggagaatgtttatatcttggagaaatgggcagggctgttccaagtggacaggctggataatggtgctgaggtagaaagtctgagggtagcagttcagcatggatggaaagtaaagtgtgtaacagaaaagacaaaaggggaaaggccagagtggggccaagatagtgaacacctgaaatttcatgtttaaggagtatgctatctaccccaattctactgtatgggtatttcctgctaattatatccaactcttcaagctcaaccccctcctgactcatctccagataaatccccaattggacccaactttacttttcccaattcattttttttttctttttttgtgatgaagtctcactgtcgcccaggctggagtgcaatggcacagtctcagctcactgcaacctctgcctcccgggttcaagtgattctcctgcctcagcatcctgagtagctgggactacaggtgtgtgccaccacacccggctaatttttgcatttttcttagagacagggtttcactgtgttggtcaggctggtcttgaactcctgacctcgttatccgcccgtctcggcctcccaacgtgctgggattacaggtataagccactgcatctggcccatttttgctggattctaatagctatgaagatcataaaccaataaaaaaacttctctggtagaaaatgttccacacaatatttatagactttttagagagaatatttcaaaatgctctaaaaacacacctgctggaaggacctgctaatataaaaacatgtttcctggaaagttacacctgccatttaggctttgtgttgacatgttcattgctgtagcctacacctaacacgaggcctggtgaatgggatgtgctcaataccaatacacaggctgaatgaatgatatgatcactagatacctgtaaaggtctactattcctatctttcccaacttatcttcaaagtctccatttcaagattacctacacaagagcactgatgcaaatatggatcattttggaaagttctgaacttctatgtaacttacaaacccagggaaacaatatacttactttgtgactccatagtcaattccaattgttgccaggtatttagacacgaatcttttctcacagtatcgctttataatacagctctaaaaaggtaaaaaatacaggcatttagtaaatacatagtgagaacacatacagaataagtatatttcttcattatggttcctccattcatcactatgaaaaagcattttcaaaagacaaaagtggcggggcgcggtggctcacgcctgtcatctcagcactttcagaggccaaggcgggtggatcacctgaggtcaggagttcaagattagcctggccaacatggcgaaaccccgtctctacaaaaatacaaaaatcagccgggcatggtggcaggcatctgtaatcccagctactcgggaagctgaggcaggagaattgtgtaaacccgggaggcggaggttgcagtgagctgagattgctgccattgcactccagcctgggtggtaagagtgaacgcttgtctaaaaaaaaaaaaaagacaaaactataaaataactgaaacaagtgttaaaagattttaagaaaaattatttttaaattcttcccttattactaaatatgcatatgttttcagttgagttctcaatcctgtgctcttttcttctgaagatgtcttctattcttatgctttcaacgataccaccaaaatatctgtctagccttgacctcactgccaagaccagatccacatctctaaatatctattagattaattcctttttttttttttttttgagcctaggaggagaggctgcagtgagccacgatgatgccactgcactccagcctgggtggcagagggagaccctgtctcaaaaagagaaaaaaaatttcctgttaaatcaattgaattgggtttgtcctacttgcagtaaaaagtactcacttcacagagtattgtacatacttctagagtttgcttttctctcttaacaataataaattatggttcccaagttaactttaaaatagctctactcacttttttatggttacacaatagtctgtgatatgcaaatattccctccatttcattgcttgctagttactttgtcatttgttttaatttgctgtttgagtcaatgattatttactaaggcattccttaatttttaactttaaaatgctttacctgtatatcatcctatattttccaaatcctttaaaatgagtatgtgttacttttacaactaaggcaaaataataagtttttttaaaagttacacttaaatcttttatccatctagaatttatttatttatttatttatttattattattattttttttgtagagacggggtttcaccatgttggccaggatggtctcgatctgaccccgtgaaccgcccgcctcggtctcccaaagtgctgagattacaggcgtgagccactgtgtccggcctagaatttatttttgagaaaggaatgtaataggaatccaacctactctcaaatagtagacagttgttacaacaatatttactaaatggtctctattttcccataattttactacatttgtgtaaattgaatttccttacgtatctgggtttattactggactctactctgttccactgatgtctccatatttccttcccaataccaatgggaaaagtttggtagcttaaaaaaaatttttttttaaattaaacaatcattttattgcttgagtacatagacaaatttatatgaccaggacagaggctgtagattactcacttccaactgggagggaggatttgcttggtcttacaatattgagccaaagggtgactctacctctctatcagaatcagacagaatttaccatccttatcctttctgttcatctcaagatgcttttgaacaataactacttcttaattaaatggtagagatcttcagggagatcaggagcaagtcccttcttggacttaagaattcttaagatgctattgcctgtcacaaaacgtacttgagcaacaccatgtgagtctctcaagaaccaaacttgaaaagggaatcatgttttaacttccaataccaaacacaaactggagaacgtgatgatgtcaaggctcaggtatcatggcatagtttcctatttgtaagatgggggtctacttttatacatcacagaaaccaacatgggaatgcatgcaaagctctcatagacatccaaggaaggtttaccgaacactaaggaaaatctttctggtggaaactgtgaacgttgaaaaaccatcatcacagtgaaaaaaaattttttttttctttttagagtctcactctgtcgcctaggctggagtgcagtggcacaatctgggcttactgcaacctccacctcccaggttcaaggcaattctcctgcctcagcttcctgagtagctgggactacaagcgtgcgccaccatgcctggctaattttttgtattttagtagagatggggtttcaccatgttgcccaggctggtctcgaactcctgagctcaggcaatccacctgcctctgcctcccaaagtgctagaattacaggcgtgagccactgcgcccggcctgaaaaatatttttaaatggctgatacagttggtcttctttcatttcttttttttccccacaattttctttgttgttttcacattaatttttcatgaagactttagtagtcttgtattatgttctgggaaaaaaaaacccttattgatgttttcactggaattgaatttcatttgtaggttgagtaattcacatctgtacaatattgtgtaatcccacgtaaggaaaaagtatatctttccatttgcctaagtaatttatctccctttgtagagtttgaaacttgtcttcatataggtgctgcctatttcatgttaagtttaaacctaggaactttatttttgttgtaactgtaaattaaaattgtttttcaattacacattccaactgaatataatttggacacaataaagttattaatttgtgggtaataattttgctttattgaatttttataatgtttctaatagtttttcagttatttctctttgggtttccaggtaaacaatcgtattattagcaaataatgttaattttaccttctcttttctaatatttttatattctcttactcttgtctaattgcactggctaataaaactagaaaaatgttaagtagatgtggtgacactgggcattctgagctgcttctaatgttgtatcattaggcacagtaaaattacttttttttttttttttttttttgagacggcgtctcactctgccgcccaggctggagtgcaatggcgtgatctcggctcactgcagcctctgcctccccggcttaagcgattctcccgcctcggcctcccaagtagctgggattaaaggcgtgcaccaccatgcctggctaattttgcatttttagtagagacaggatttcactatgctggtcttgaactcctgacctcaagtgatccgcccgcctcgtcctcccaaagtgctgatgtattacaggcctgagctagcgtgcccagtccctagaaaaaaaaaaacacctcgtacacagctgacgttcaaaaaaatgttgactttcagtgaatactatgctagcacatacacacaaaagtagtacgggatcatgctacacagaaataaaaaacactaagtaaacatttactgagcatctcctgggtgccaggcactggactaggcactgccttaacagctctttcggagttgattttgaacgcatacaacgacggaaagagcaccgcagtgggaatgtgaagacttaggttctaatctttcctcggtcactgatttgatgaccttgggaagttcttaaccaacagattccacttgcccaaaaggaaagaatttgagtgaagaggaggccgtcttggaattcataagggaaaaggcctcaggttacctctggccttccctccccacgtactaaaggagagtttatagctgatgaaccacagatggggcagagagaagggcggtggaactaacagatatggggacaccaccaaaaataaaacacaacgcaaaacaaaacagcgcggaccccggccatcccttgcacctcccctgtgaaacacgtcaacgtcagttacgctctctcgtgacgggaatgcagaatctgggctgccgggcaccatttcgcgaaccccaaattctcacacgcaccccataacgttccgccggctcccaggcccggctgggggaactaaactttcatcctccatctcccggtcccggacggccccctagaacgcgggcaaggtatctaggccgacggcccctcatggggacccaggccttcttactcttttgggggtacattcaaggcttagaggccaccccagacaccatctccggaagagtgacgtcggaggacgagggggcaacggaaaggtcaaaaaggtcggggagtttcgttcgcggagccgcacccctcggctgagacccgggcctgctcgggggcggagaggaggccgggccccaggctgttgagtggccgcccttccagccaatggacacgtcgccccgccacgctggggcccgcccctcccggctcgctgtactcactttccccacttcggcgttgcccatggagatgactttgatgcggagagacctgccgggctccttccgcttcggcatgttggcctccatggccctggctctctcggggccacccgcctcggtctcttcttgtgcaccgctggcccgtccctcaggcctcctcgtccaatggcggagccgctgctctcgtcaccgcctcgcctccgctgctcgccatccccgccgctgcctggcagcaggcgcgggcggttgggagcgtggggagccgggggagggagacgggagtctcgcgatgctagcgcggggctgctgacgtcatctgcaggccctggagacgcgactgcagttaccgagtttctaaggcctcgtcccctgacgggaaggcggcgttggggggcggctgggtttacccttcgaggtgagcgcgtccttgttttcagggacgcccggacgggaggcgtttgttgctttcgcagccgagtggtggaaatgtattggctcttcagggcgggtctggtagtgtctcgtccgtttgggagtgtttttttttttttctggattctttttcggttccatgggccgggctgctgctcctcttccccctccaatattttgttccccttgctcgagatccccgagaggcagaccccaaagccaggaaagtggggaggtcggaaccctggttctggaagagggccttgggcaaggcgtgaagcgattctgaatctggttcctattgttttttattttaaatggagttgtctatttggagtcaaggcaagagtgtttagtcttggccctcctattacagatctctgatggatttgttgactcctctgtgggagaaaggcttggtctactgcaggtgttaacgctaagccaggctggagctgtggacgtcagtttcctcagctccccgctgttcgcttcgaacgtgacctcgacgtctgctctccccttccctttagctgacaatgtgacagtgcttgaataaaagtcagtctgacaggaacggtaattttttttcagtgaatatcttcagttacagaagataaatagaacttgacaatgattatttatagtgccctgaaaaaaaatggctgccaatttccctgtatattacaaagacaaaagtagcattgcttcttttctcacctaactttaaacatcttaagggaagtgcattacaggaaggcaatgagcaaaggctcaacatttcacagtaaagtcagattttccacattttaattttaaaatgtgttttttaaacattaagttttttttaagacaagtttattctggattgttttgataatcaaataatataacttaattcactgaagcttctaaaattatttacaaatatgaaatataagtcctggttagaatttggatagttttaaagcttaaaagaatccacatgctaacttctcagtatgatttaataaatcaaattactaaacatgtaatttcttcgacagttcacctttggccctgtaatagggtaactggtattgtggaagaataattataaaatgtcaaatcttcagctgttatgattgattaagtatggtgctgttgagactaagcagtaaaacatgccacagatttaaattgattactatttttttcatattgatggggttttttttgtttttgtttttgtttttgagacagagtttccctcttgttgcccaggctagagtgcagtggcacaatctctgctcactgcaacccctgtgtcccgggttcaagcaattcacctgcctcagccacccga

SEQ ID NO: 165 - DNA, 579949 bp, Homo sapiens
  source 1..579949: mol_type = genomic DNA
gttgagatgtaatgtacagtaaaatgcacatcacttaaaagtttagtttgaggagttttgacaaatgtatgcccacatcccagtcaagacatgggacatttccatcactccagaaagtttcctcatgcctcctacagtcaatctccactcctcaaagacaaccacagttccgatttctattaccatagaatagctttgctggttgtagaacttcacatacatgaaatcaaaccaatatggtctttggcctttttcattctacataatgtatctgagattgttgctatatcaaaagtcttttttgtggcagagattatttcactatatatatataccacgtttgtttattcattcacctgttgatagacatttgggttgttttcaggttttttgacattatgaacattttaatatgtctttttagagttagaaggaactgtacattaaatgctgagattacaaaagatgacttcagttttgaataaattgagtctgtagtacttgtaggacactcaggtagtattctgggctcctcttggagtacagtctaagttgcagaagagagacagggtctagcaatgtaaatttctgtagtcgccagccttgattcagagttaaagctatgggaaagtcctcaggcagaggacaaacattagacaagaaaatgcccatatatgaaaccctgcgaagcatcagtatttgaggagcagactaaaaaggaaccgtctgtggaggctaagagaagcatggccatttatctttgtgtcccgatcatcaggcacaggaccccacacacagtcacttctcaatgtgctaaatttcacagaatgcgtccagggtacctggttctggatagatccggtagaaggagatagaccgggagggcaaatggcatgaggagtctcacaggccagagtgattaaaggggtgtatcggggcggtaaaccctacagactctacctgtgcttatgcggggctggggaggacgagtcattacagatgaagaattaagtaaggtcagaccactcagggccttagatggatgtcacattgaagaatttagactccaacaggcctgccaccctgggaggagtcatcgcggattctggagaagggcgtgacagaggagatttcctttcgggaagtgtagtctggcagcggtgccccggtggtggcggcggcggtgctgctgttgctggtgatcgtgtggtggtgttagcggcgatagtgctttccactgggctttggcttggtagccgctgaaagagaacaacgctgccgctgctgctgatttcatgccatttcctgacccggcgctgtaacttggcctctgagccttggccacagaacgcagaggccgtggcatctggccgcagctgggctgcagtgcgtgcgcgcctggcctggtggtccgatgggaagcccggggcggggcagccgcggggcgggggcggggcgtcgcggagataggccacgcccctgcccgcccgcgcaggcgcgctgcgggtcgttagctgtcagagccaagcggcgggctggcggcgggctccgacgtctgcgccaggacctggctggctgagcccggcgcagcagcagcagccagggcagcgcggcccctactccctgtcaggtcgtagaggcgagcagggaccagctggtcgccggcccctcgggcaagatggggaaccgggagatggaggagctgatcccgctggtgaaccgtctgcaggacgcgttttcggcgctgggacagagctgcctgctggagctgccgcagatcgccgtggtgggcggccagagcgccggcaagagctcggtgctcgagaacttcgtgggcaggtaagcgcgcagggcgcggagtaaggatgcggcagtggggcgaccccgctgcgggccgttggaacgtggacgggcagcgggagccagagggtggatggaccaggcgctgcggtggaatggggggcagagtggaatggggggcagagtggcggtgtccgtggggcgggcggggtcctccagctctgggcatcctccgtcccctgccaccccccgcctggtggccctcctgcctgcctttcatcgtgcgatacaaagccatttcctccctgtcctccagtcggggagtcgggggaggggtccgccccgggctcgacccccaccccctcggtgcgcgccagccccgggcagcctccctgcgtagcgcgccgaaagcttcccagtgcccctctcctgttttcccagctcaacacccccctccttttcctgtcgccctccgtgaggctccctgtgaggctgtggggctttatcccccgagccccctcccttaggtggagatgctttccttctcgccagggttctcgttcctctcagctgtctactgttgcctgcctctagctggggaggcggggtgcgaggagaaagacgtcgtttgttgtggtgaagctttatccagagacgcttccccaccattctcctcccggagagtcgaagaataaaaggtggtgtgtttgcgtgtgcacctattcacagcttcaggcaattgtgagagagcccgaggcacagacttggcagggggtggacgtggacttatgttgtccaggtgccatgtcattcctgcatcatctcggaactgaccagcatctttctcgcactctctctgcgccccctcccccagcatcatcttccgttctctaagctcctatttgtcttgctagccttcaagacaacattctgaatctaaattgtagctgtggttttcctcatgactcttaatacagaaacagctaaggaattaattttcgaattaggaatcagcatttcttccactgagcaattcatgagggattaagttaccttaatggccttgcctgaagagtgcagacatttgctaagaaaagcccatttaaaagcattatgaaaactgaaatctgtttcctagtaatagaaaaccaggtagaaatgtacagtatccaagaaaaaatgctggcgagattgtactttattctttttatttggctcattcgtgacttgggatgcagaaggttcctgtttctgttccttttttctttttttgttagtgcttggtgatgtgtagaatttagagctgaatattcccacatttcctttggaaatgttagtgttcataaagtacatattcctttctctcaaatgatattccatctctcagatgatattttttttcctgtatgaactagaaagataagaagcctaacaaagtaaaattgctgacaattggcttgtatccttgagtaattcacttaatcactacacctcatttttatattttttttgattaatgaacaaagtgaaggtaaagcattttgcctacgtcatcttagacttttggtgaagtgatggatttcaaacatataacagttactttctttgatttgttgccaatgaaatttacgagatataaagtggcatccaaagagtgagttttggtaacatatttttggctttccaaagccagggcatttttgtcatgacaccttaagagttatttaactatttttgttttttaaacaaatacttaaagattaaaactgtaagtatttcaaatgaaattaccatatttttatgcatctcccatatatttacttggatgagcctatattgtatgcaagtgcattgtttgtggtcagagcttttgaacttaatgtcagttgtatgcacataccacaattctacattctaggttttgaaattctaacattcttcctaatgttataataaaattgtacacatctccccacactagctatgttcttttggaataatttgaaaaaagaaatgtagaagagtaaaatatttaagtttgaatatttttcaagatggaataaaaaatagggacaagtataaaaatcagagcacgtaccagaatgcattagtaatttgttgtactttaaaaagttttaccactaattgactgttagaacgccaaatcaaagaaaaggatgaccatagaggaaaaaggtcatttaattcatatgtaaagtcttaattatatgtagagataacacctgcctagcagagcttacatattaaggagaaaatttaattaggaaggtcatttgactttaataaagatttcggtcattgaattattgaggaatctaatttctaattataaaccaaccttagggaaaatggagttttctattttgataagttattcagcctaggtggaaaaaattgtatccattttctactgtaacatcttagcattttcttgtcattatccaggaattttgcaataaaaacagtttctttcctaaggatgcaactttcctcttttacacgaaacagttttcattttaagactcgatctaatgtgcagttattgaatgcagccataaaaaccaagggtcatcacttgtgtaaattcattgtgtttgctcttgactcaagcttcttctctacaaaataatgatgcattttctcaacaatcctcatttagtggactaactgtatcttctctcagtttgtttatattgagtttttttggacaccaatgaatgaattcggatgtgaatatgtttacttcatttagcggttgctgtaaaagctgatttttgggtgacaggtttgagattgttatgaataaaatgagtcatgaatgaaccacttgtttgtgattttcttgctgaagtgatgaacttgcatattaatgtgatatagcatgagtaaccagattgttcttttggtggtgcaggatgagatatatgctggcaatgagaggcagcttaagatctaatgaatagaatttgagacctataatctgaacataggggtttactagctggcttgggtctgcctactggtctgatttgtatacagaagaattgaatttattcaactattttcattatacgtatacatatatttatagtgcagtggtgatgataataatggttaacatttatagagtgcctgttatgtgtaggtactattctgggtgcttttatatgaataatctcatttagtcctcatacaaccccaaagaggtaggtactcttatgatttccattttacagaagaggaaatcaagatttagagagtttgagtaactcactcaaggataatttaatttaatataaaaacagtggagctaagattcaactagaggtgttgatgaccataacccatgctctagaacctctgtgccatattgcatcctccatgttgaggtttaccatttcctctgataaatacttttaacttctgtcttgctccctatataaatgttacctatattaataagaagctggccaggcacagtactcatgcttataaccccagtatttggggaggccaaggcgggaggattgcttgagcccaggagtttgagaccagtctgggcaacgtagtgagatcttgtctctacagaaaaaccaaaaaataattagccaggtatggtggagcatgcctgtagtgccaactacttgggaggctgaggtaggaggatcacttgagtccaggaggtcaaagctgtaagtgagccatgattgtgccactgcactccggcatggctgatagagcaagactctgtctcaaataataataataaacaagaagctactatgttaatgattttattaatatttatttacatatgtttaccttgcctcatttcacagaagatttgaggtgaccccttaggcagaagcaacatttattaaaagataagtatttttctttgctatattagacattcttgaagagagttttaaaatgtaattggattgtttatttaagtatgtttttagagtgcatataactcatttatagaggtgttaagtgaaaactgtactagttgctaatacgcagatgttttaaaatgacacgcttgttagaaatattagtttttcaatgctaattatataggcagaagagtccacattattttattctagtctgagtggtaaatagactctcaattctgcacaaatagaaaaagttttttgattaatggggacgaaataaaatatttttaaaaagtgattatgctgatatttttcaagaaattgcttctaagtattatagttattagataaatggtgcttacaattaaaatgtcataattattgagaaccatacttcatagttcccaaggtctataaataaagtgtcaaaacatgaacttttcttcatgcaacaatgaattggtagaacttgaaatcacaaaaatatttttgctgaattaacattatataatatacttttaggttatcacaaattcacagttggtggtacttaattactaccatcaaatgaattccttttttattagtaatgtctgagagcaatataactaagataactagactggataggatatctctgttttggaatttacttatgattaacagttatccaaaaatgcacttgatttaacttctttaagaatgaagttgggcagtcacccagaaccttggaggaatggaaacttaatgtttagctggattagagggtaggctattgggttctctatcaatggagtatacatttagagtgttaggtattcttcttaggtagtaccttttgctatggctagtaagttaaattatgaagttttatttattattgtcatttattttagagggacttcaagtatctagaaagaaatagattatttttttcctctgctaccagagccaagtcaagagagtcccaagctcatatgctatatagaatgatccaatttaattttctgcatggccaaagttttgcaatttatcctagtccaagtttgcattgcagtttctcacactctctgcattgatttaaaaattcttatggattatgtcatactaaatacattttataaagtagacggaaaaaaggggccaacatttgcttagccattatggggtagcagacatggattctgctagatacttttcataccttctattccttacctgtttccatatccccatgtcaataggggagaaaattcagggttggagagacaagtcattcacccaggatcgtatagctagcaagcagccaagctgggattcagtatgactcctcctggaactcttgagaaatatggacacataaaaccaatgaacatgtatttattgagttctaagtttactgggtaagaatatacaagaaaatatgaatacatagaagcttatgtatgtataaaaagagaactgacaggataaagtatgagacaactttcaaatgcacatgtaaaatgaaggtagtcagatataatgcaaactaatcaggataaaaaattatagtatgtcaatttatttttacaaaaatccctgaaaaactacagttctgaaattgaactgaatataagtggaaagtagacaatatatgcatttccagtgtcatctggcagcccatatcattttagctcaagcctgcatgtactgaagtatctatgtcaaagcaggaaggtggtgatctgtgtctcagtttctgagttgacaacaaggcattgaatttagactgtgactttatcacaaagagatactgtatattggagagggccctagagaagagcagcaaggaaaaaaaaagagattggagagattaaaaatataactggatgcagtgaaggttaattgagagtgggatggatcagatcaagtattttataaggacttccaaggcactaatacttaagggaggtgaattctattttccttttaaagaataagtcatttagttaaaggagtagaataagtcaaagacacaaatgtcagggaaaatgtcctaaaggcaaacctgaaaatggaatgaattgtttagaatgggaggagggtaaaggagttgacactaaatgatttgcatttcatgaattaaaaatcatttccaacaaattagagggttcattaataccatattaattactctctctctctctctctgtgtgtgtgtgtgtgtgtgtgtgtgtgtgtgtgtgatcataggtagcttagcttttcttcctttaatagtagcaagactggcatttgatgacattattataagaagcttttctctggcttgattttctctaacttcctggagcacagtaggatacagagaaaccagagatttgcccaaggtcagaagaaatcagagctaggtttggaacttaatgttaggaactgggaggcctgtgccagttcatcatcttctcttcctcctgttattgttttagagcacctccctccaaccctcaccctgcctcctccttttcccatccctttgcattgggccagcctttttctcttccgtgatactctctttcattactcttcttgatagttgaccagcagtgacattgcattttattaccttttttttcccatacagaatagtggagacagggagcagaatttttctcagacttaggcaagttaatttgactgaaatagtatactcgtgagtaaagcgtgacttttagggaacagatgggcccaggaaaagactaaataagatattggatgtttttacacattattaatatttatccaccaggtgggcattagctagaaagatatgcctgagatggtcatcaataggccttgcttaaaccaacacgagcttctgaaaagttgtatgtaaataaataatctaaatggaaatgttattatttaaacaagtgggtgaacttttaggtaaaataaagatgtatttgtgtagcaaatctgcatccttcagtttgcctgttttctattctttttgtgtgtgtgtttgcattcttagagtgcattgagtgacattgaggtccattaatgttatagagattattttaacaatttttcaacaagcattaatattgcattgtctttagtgttaattgataacaaaaacagagcagttgttgaggaaaatgatgatacatttaattccggaattatatgaatgatacaggattgctttagatcttgtttttctctaatatccctgctgcaagtcctctatttccaagggtttaaaatgtacctcagtgcttctttgtgacagtgtgtcatttttatttcccactgcttcaaggtcatgatatacccatgaatagcatatatatacatgatagcagtagctaggtatcctgaaggacctcattgtttatccttccagtggcttggaattgaaagactaatctatttgataagtaatttgatgggtgactaaacttgtttatggtgcttatttttttagatttctcaaaagtgagtatttgaagaggagtcatcacagcatggtgatggagtgcaggctttgctggcagctcttgagtcctgcctctgactctcactggtagcatggctcctcattacggaatctagcctcacttggcctcagttccttcatctgcaaaatagggattgcagacttcaccttttaatctgtgtgtgagttctgagtaagatggtatcaagtgcctggtccatagtatgcattcaataactgattgctcttaatttaaatcttttatttagactggacattttttgagtgttttaaaaacaaaagtaagttgaggcagatggtaatgcgtatttgcaaattcttttcgtgaatgttggaaaattacagttgcatcaaaatacttacttgtagataaggctaatagaatatatttgagccttctttaaagaaagcattgcccacattcgttaaatgcattatcacaatgtgttcttttttttttaaaccaatatatacaaagtgaacccagtttgtatactcttcccttccaagagttccaaagcagtttttatcatttcattaatccttcgaatttctgtgagaagatagcaaaagcatgttttgtttactttaatttagaaataaaaaagattaagctggaaaaaagttgggtgacatactggggtcacatggtgagtactagaaattaatgaacaaaatagacttaataacagataatagaattaaaatgaatttttctgacattatttttagttttctcctagagaatatattttaaggaagatatttgatgctgtgatataaagtaaaccattcttagcatattccttttcttttggaaatgttagatgaaattgcaggcaaagatggtgtagaagggggaaaaacaattgaggaagtctagttggcgaagcaggactacttagcaagagtatggtctgagcccaaggaaaccatctacaaccaagtgttcaggaggtaaggtgtaattagatcttaaaagaagtaccaacatttttgtagtagatgttgaaataataccaaatcactcttttttccagtggaaagattcatattctgatttgattgacattcccataacttgttaaccatcagttttagctctgagctagtcagctggttctgtttggaattacattatttttaagttactagatatacctcagaagctttgaaaagaatagctttgggtttcttatctagtggaggtttagaaccctgtatatgtgtgtctgtttatgttttctggttaataaaactaagacccattctcttcatattttgaaaagaggggcaaaggcttgcaattatttttatagatcctagcattcatggttctgagtcctactaccaggacagcaacaattgtgtggtgagatttctgcattctcatctaaataccgatagaacgacctgcatactgaagtccttgtaaattcaacttaagaaactttagcctgtttatttaatcctaaaaacatatcatgtaaaatgtgtatgtgtgggtacttgatttgaattatgtactttgaaagttacatattctcttagggctttgtttttttttttttttcctcagagtaagttaagaagggaagtggcagaaggatcatgagttccttgcttgcagagtaagtggggagatgagaaggaggaagcaatgcttttgtgagtgtccaccagattgtagggacatacgaagagaaaagactggtaaggttcaaccactgtgagaattaggagtatttgtgaatgagttagtctggggtggctttggttctctcctgctccctgtggcaggtggtccctgcatatttgttcaaagtgtgccacaggtaagcaaggtagcatgccaagaacagtgagagctgggtttagtctggcctctgctgtcatctgctggtcttctcagctctatctgtctgatttagaggcccctccttggtggcccttgttaatatttcactgcacaggaatctaccgaacagttggttgcctcctctgtctgctcaactatttgcagcttccacgaagccaggagctgtgtctcctttatcattttccgtagtgcagtgccggcatatggcaggagctaactgaatgaatcagctacttgactctgtacaagccatttatctaagctgaaacatacctttgtcatcaataaattggttgagaatagttgagtgggcttggattagaacggttgttgttttttgagacagagtctcgctctgtcgtcccggctgaagtgcagtgagtggcatgatctcagctcactgcaacctctgcctcccaggtgcaagcaattctcatgcctcagccacctgagtagctgggactacaggagtgcgccaccacacctggctaattttcatatttttagtagagacggggtttcgctatgttggccaggctggccttgaactcctgacctcaggtgatttgcccgcctctgcctcccaaaatgctgggattataggcgtgagccactgcacccgacctgaacagtgctttttaaactgtagattgtgacctaatagtgggccatgatatcagtttagtagatggtgtgtgacagtgttaagcgaagtatcagactacatccaaggtagttataagtaccactttgtgaaagttttgtattagttgcatatttgtatatgcatactaggctgcaatgtaaaatgtatttcttactatgggttatcctcaaaattgttgaatgcctctgatctagattaaatctaatattacttctagtcatttatttggttattttctatttaaatggcaggacatatctttttattagagaagacacaattcacactataccattactattccactaggatgaattaaaatggaaataactttattaatttaaaaaagctgtcttttaattgaaaaagtgatatgtacatgtaatacaaattcagacattccaaaatacattatatttataccacataaatccctttcccctattgaggtttcttagtaagatgtttcatttacctgcctatcttccagattacttctgaatttatattttctttatatgaaatttatttgagttttgaggacagagagaatttaataaacttgtttgtaagtagatgatacaaccagttaagaaaggacatgtttgaaaattcttttagcagatggatttgtccatttactgagtcatttacaaagaatcatatgttgagagtccacaatatgccaggaattgtgtgaggctctggtatgcaacagctccttcaaagagcttggtgatccagtgggtacaggattgctatgcactgcactgtcaggatacccaggctaacaattcttatgagagccatttgtcagagaatagttggtgagttcatgatactgtctctaaatatttgaggagctgttacttggaaaaggattagactgactcagttatctccccagaagacataattagaacaaatgggtgaatgttacaggcagatagacttaaacttaacgtagaggagactgttcaatagaacactttaaaaaatggaatggattgcctgtgaaacagtaagtattccatccccataagtgtagagactggcgattgatgacttgctggctgcttggcatggtgtagtcaggagaggggttgaacaaaaggactttgaaggttttttgtttgtttgtttgtttgtttgttttaaacagtctacgatttggcttgatggatgtcagagagaaacctggctttaaaaaaatgtgtgttttctataggttatctgtaggtagataagaaatgacagacttataaaagagttaagacctctctgggtctagaccttcaaaaaatcattatgcctgtcattgtatggatgtaaagaagctggactctctcctggaatggctaattccatgaagcagctgtggttaagggtgttttagaggtaaactgtatttattctttttttttttgagacaggctctagctctgtcacccaggctggagggcaatggcatgaaaactgctcactgcagccttgatatccctggctgatgagatcctcccacctcagccttccgagtagctgagaccacaagtccgcaccaccatgctcagctaatttttaaattattttttgtagacacagggtctccctatgttgtccaggctggtcttgaactcctgggctcaagtatttctcctgccttggcctcccaaagtggtggcattacaggcatgaaccactgtgcctggtctgtatttatttattttttaaaaaagcttaattttaaaatctgcttttctaattgacccaatttctttcagtggtatactagtctagaaacttaaaaaataaacatagtttagtttcctttttttatttttaaaatcttcctatatctaacacatcttgtaatttctttattcaaaacatctttttggtcagccttttcctctttattctcattctgaccatcagagtctcagctgtcctcctttcgcatgtgggataactctgacagcatcctgccctctcactctctccatttcttattcatctattccatgtaaatattgctgctctcaggttaatcttccaaaacacaagtttaatatctctgtcctcagtaacctgcagtcccctccctcccctttaaaaatctctacttggttttcaaaactttctgaccattcagctttgttttccactcctcccagaggtattcacctcatttttttcatcttttctgtgtatgcaatggcaatttctgatgacttaagaacatgaatagcttgagtagagcatattttatgaccaaaatgggttcaaacaatcaacctatacttgagttgctactttgtgaaagacactgttttgggatggaaaaaaaaatatttgcccttaacagaaactagtgtagactagcatagagtgtagtcagaacttacagagtgttgaggtaaagaacatgtattctgtggagcctgactccctgggttcacatcgtagttctgccacttaatagttctgtgatcgaaggcaatcacttaacctgcctgtgcctcagcttcctcattggtacaatgggacaatagtagtaccctcctcatgtggtggttgtaaaaattaaattaatacatgtaaaacacttaggagagtgtctgtcacatggtaacatagttacctgtttatgattattattactggggatggaagtttagacagaatttgggtgcctttagaggtgcagtgttctggatgatcaaaggaaaagagcaatttttcctttttttctgagacaaagtctcgctcttgtcgcccaggctggagtgcagtggcgggatctcagctcaatctatcaaattcttactatttaatgcccatttaaaatcctactggtttacatgaaatctttcttggactctcccaaagaaaaattgaaagacctctgcctcccagattcaagtgattctcctgcctcagcctcctgaagagctgggattacaggcccccaccagcatgccaggctaatttttttttttttgtggagacggggtttcaccaggctggtctcaaactcctgacctcaggtgattcgccagcctccacctcccaaagtgctgggattacaggtgtgagccactgtgcctggcccaatttttccttttttaaaaattattattttaggttcaggggcacatgtgcaggtttgttttataggtaaacttgtgtcatgggggcttgttgtacagattatttcttcacccaggtactaaatcgagtacctaatagttattttttctgatactctcccttctcccacccttcaccctcaaggaggccccagtgtctattgtttcctttgtgtttatgaattctcatcatttagctcccactaatgagtgagaacaggcaacatttggttgtctgttcctgtgttagtttgctaaacttaatggtctccagctccgtccgtgttcctgcaaagaacatgatctcattccttcaaggctgcatagtattccatggtatatatgtaccatattttctttatccaatctgtcactgatgggcatttaggttgattccatgtccttgctattgtgaatagtgctgcagtgaacattcacatgcatgtgtccttatggtagaatgagttatgtttctctgggtatatacccagtaatgggattgttggattgaatggtacttctgcttttagttctttgaggaatcaccatactcctttccgcaatggttgaactaatttacactctcaccaacagtgtataagtgttaccatttctccatatctttgtcagcatctgttgttttttgacttttatataatagccatgctgactggtgtgagatggtatcttcattgtggttttgatttgcatttttctgatgatcagtgatgttgagcttttttatttttttcttctcatatccctgttggccatctgtatgtcttcttttgaaaaatgtctgttcatgtcctttgcccacttttttcttgtaaatttgtttaagttacttacagatgctggatattagacctttgtcagatgcatagtttgcaaaaattttctcccattctgtaggtggtctgtttactctattgatagtttcttttgcagaagctcttaagtttaattagaatccctcttgtcaatttttgcttttgttgttattgcttttggtgtctttgttatgaagtctgcccattcctacgtctcagatggtattgcctaagttgtcttccagggtttttataattttgggttttacatttaagtccgtaatctatcttgagttgatttttatatatggtgtaaggaaggggtccagcttcaatcttctgcatatggctagccagttatcccagcactatttattgaataggtagtcctttccccattgcttgtttttgtcagctttgttgaagatcagatagtcgtaggtgtgtggccttatttctgggctctctattctgtattctgtcccatcagtctatgtgtttgtttttgtaccagtaccatgctgtttggttactgtagccctgtagtatagtttgaagtcaggtagtataattagtttagctgtgttctttttgcttagcattgccttggctacttggctgttttttggttccatttgaattttaaaatagtttttttctaggtctgtgaggaatgacattggtagtttgataggaataatattgaatctataaattgctttgggcaatatggccattttaatgatattgattcttcctatccataagcatgggatgtttttccatttgtttgtgtcatctctgatttctttgagcagtattttgtagttctcattgtagagatcttccacctccctggttagctgtgttcctaggtattttattctttttgtggcaattgtgaatgagattgtgttcctgatttggctctcagcttgggtgttgttggtatatagaaatgatagtgatttttgtacacggatttttctatcctgaaaccttgatgaagttgtttatcagctggatgacactatggggttttctagatatcaaatcatgtcatctctgcaaacagggatagtttgacttcatttctttctatttggatgccatttatttctttctcttgcctgaagaagcagtctttcaatttttctttggagagtccaagaaagatttcatgtaaactagtagaatttgaaatgggcattaaatagtaagaatttgatagatcgagatgaagccagacgcacagaaataaggatgtgtttagggaacagagaattttctatgtgacctatgtgtctagaagaggagtggtgggagatagagctggcagagtgaattggggccctatggaggattgctaagatgaggaattggtactgaatttaggaagcaatgaggagctgttaatgatttgtaagagacattgcagtgtgcctggagtcaggctttaggaagattaagttggccacatattaactggaggatacatagatggagggagacatctgaggtaccagtggggaattaatgattgaatggtaatagggcttgaaaaagtatgtttactggtggaaatggatacaggtcatttcagagacagaggctgtgattacaaatggtgagtgacagaaaggcagagagggaataaaaaataatttcaaactttgagtagatccctggaggaaggatagtaaaattcatagaagtaaataagtttagagagggaaggaatgcattctctctctacttgcaactggtcagatcttccattctaccatcaagctcagggttatccatggaacatcccgtttgaacactctgtctatgctgattttgaccttctcagatgtcctgatgacttatggttcaaaactgtttaaaacttgaatatttctgactgtttcattaacattagcttttgcttctgggacagactgcaaacccttaattagtattccccacagtatcttgaatgatagtgttttaggtaccattatggactgaacgtttgtatctcctccacaaattcatgttgaagcccaaaccccaaatataacgatatttggagatagggccaattaggaggtaattaagattaaagaggtcataagggtgaggccctgatcaaataggattagtgtccttataaaaagaggcactggagagctctctctctctcttcctctgcacaaaaagaagaggccatgtggatacagagagaaggcaaccatcatcaagtcaggaagacagcccacaccagaacctgaaccagctgaatcttaattttgggcttctagcttccagaactttaataaataaatctcttttatttaagtgacccagcatgtggtattttgttatggtagcctgagcagactaataaaagtacttaacttgtattgagtttttgctaattaaattgttgatctgacttagatgggttggtactgagagtgaggatcatgtgtttaagtaagagatttatttttacatttatgagaaaaaattcactgatgcactaatattcttagcttgataagctagtgtccttagcccatgtgcctcagtttttgaggtatccattctttcacctgtacttctctcttcattttcttaatgatgtaaactacttgtgagtctcccatctcaacctttgccctcttcagctgctgacttagctttcctacccgataaccatcacacaactctcactgtctaaatgcaggaaccaaatggatttgaaaaaaaggattatgatactgaaaagattggtccatcccagcatctcccaaagcaagtatatggatatctgtgtaagatttacctgaggaacttatgaaataaaggttcctaagctccactaatggaggcccactcagtgggtctggaggtaagccatggtaatcggtatttttcagaagctctcctcatgctcctgataagcagccagatatgggagctattaatcaccacttccacaattcccattatttctgcagctgaggataacgaatgcagtgtgtcttccttccccatcagtacactgaaaccgcccttcccaaggtcaccaacgatctccagacagcttaatttactttccaaatatgtctgaaactgatcatctgtgcttaattcctacaaccactgactgagtacaagttgtcatcattcatcttctggactataacaatagactcataatactttccccatttgtaaccttccaatctgactttcacacagccatagcataattgatatggaattcaaattaaatcacatcactgtcatagttaaaatttttcagttcctaatgccaacagcataaaatcatcaaagcttcttgggatgtcatacaaggccctgtgtagcccagcttctccaggttatgtgttgttattcttttacctggctgtgtagcataccccctagacacccaccacgctgtttcattgcctttgttcacgttgttattgttcttcaccccactattattatcttgaatttgggtctcctttcctctgggataccccaactgcctcccacttcctcatgtctcctaggtttcttgtccctcttctgggtatacataattctctgagcatttctctcatgttatacttaccacattgtgttaaattatcttatttgcttctatcactaaattgtgagcctctcgagggcagggtctcttttatttgtttatcttcacttctagcatatggtaatttctgaataattattcaatgcattaatctacaaatataatggagagctttcagcctttttcatacctgatttatctgcaacatgtgatgccttttattgaacatccactgtgtgccaggcactgtcttaagcaccagaaagacagtaataagtgaaaaagcacattccttgtcattttggagcttgcagtctaatgaagaggcatataataaacaaataaaaatgtataattataaatcagtatggatgccatgacaggaatgatcaggatagtgatagaacatgacagagagtgacatatttatcagttggtcagggaagccagtctgatcagatgacatttcagctgaaggacaaggaatcagtcataagaagagccaggaaaaagcattccttgcagaaggaacagtatgtgctaagacttcgaggggtcacagaagtctgtgtgttggaggaacttaaggtaagtcagtgtctccagagctcagtcgagagggagaaatatagcaaggaaagatagcagagggaagttcaggtaggctctgttgttgccaaaaatagattttatccagagtgctatggtaagtgactgaaggaaggattttaatcaggttagttatgtaatctgatttacattagagaaagattactctaggtcagtgcttttcaagacaatagtcactaccccatgtagctattataactaatgctactgagaaattgaatttccagtttaattttagttactttaaatctacttttaaaaatataacgaattcagttaagtatgttttggtacatgaagctactttttcaactataaattttgtgaactttaaatatagatcaggtatttctgataaaaatttagcatccaagttgagatgtgctctaagtgtaaaatacacatgaaatttcaaagatttgctatggaaaagaatacaaactgccttattaatgattttatattgattattaatacatattgaaaggattataagttggagaaattgggctaaataaaatgtattgtttaattttacttgcttctttttactttttgtaatgtggctattagaacatttaaagttatttacatggctcatattatatttccattagacttgcattgcactagatgctgtgatgataatggattggaggcaggcaaagtagcagcagagagatgggttaggaatcttttgcagttgtctaggtgggtgataatggtatctttgattagggagtggcagtggaaatggaaagaagtataaagagtctacaaatattttggaagtagagtcataatgacttgctgatggactagatggggaagggaagaatgaaaaaacgactctcaagtttttgacttgtgactggattgcagtgttgccatttcctgtagtgggaagactgagaaaaaagttgggagttgaacatctaaggtatggatttgggcatgttagagcctgtaaggtatgcaggtggttggatataagagcctggggcacagaggagagtttaactgaagatattaatcagtacttgtcaatatatcattgatatttaaaaccttaagactgcacaccaaaaactatacaacatcattgaaagaaattaaagaagaccaactaaaatggaaagatatcctatgttcatgaacttgaagacttaagtgttaaaatggcaacacacctcaaatcaatctgcagacttaatgaaattcctatcaaaattccagatgccatttttgtgcagaaattgacaaactgatcttaaaatttttatggagttgcataggattcagaatggccaaaacaatgttgaaagcaaaacaaaacaagttgaaggactcacacttcccagttctaaaacttactacaaatcagtgtaatactggtgtaaatatacacatactaaatgaatggaatagacttgagagtccagaaataaactgttacattcgtggtcaattgatttttaacaaaagtaccaagataattcaatggaggaaagagtagccttttcaacaaatggtactgggacagcagtatatccatgtgcaaaagaatacattggggcccctacctcacatcatatatacagattaactcaaaatggatcaaagacctaaatgtaagagctaaagctacaaaatttttagaagaaaacacaagtataaatcttggtgattttagattagacagtagtttcttagctacgatacccaaagcataagtgacaaaataaaaaatagttaaagtgaacaacatcaaaattaaaaacttttgtgcttcaagggacactattaagggtatgaaaagataacccagagaatggggggaaatttttgcaaattatatatgtgatagggaactagcatcctgaatacaaaaggaactcttataacacaacaataaaaagacaaataacccaattaaaaattaggcagaagacttgattttctaaagaatgtataaatagctaatatgcacatagaaagatgctcaacatcagtagtcagtagagaagcaaattaaaatacaatgatatgccaccaggtatctcactaggacagctatgataaaaaggagggatactaacaactgctggtgaggatgtggagaaattggaacactcatccattactggtgggagtgtcagattgtacagacactttggaaaacagtttggcaaattcctcaaaagttaaacatagttatcataatgttatacgaaacaattcaactcctagattcatgctgaagacaaattaaaacacaaatatgtacatgcaaaaacttgtgcataaatgtttatagtagcattgttcataatagccaaaaggtggaaacacccaaatgcccaccaattgatcaatgaataaacaaaatgtgacatacattgaatacaatggagtattattgagccataaaaaggaattaagtactgatacaggcatgctacaacatggataaatcttaaaaacattacactaagtgaaagaagtcaacgcaaaaggccaatagtatatgattccatttatatgaaatgtatagagtagagacagaaagcagattggtgtttgccagggcctagggagaggaaggaatggagaatgactactaatgggtatggagtttttcttgggtgataaaaatattctggaattaaatagagatggtgttttataatatcatgaatatactaaaaaatcaccaaattatacttccaaagggtgacttttatgatctttaaattatatctcaattaaaagaaaaccttaggacagagataaatcactttgagggagagtatatgaaagaaggaaaagagaagcagcaacagaagggccctgcaaggaagcccaagaaggagaggccaaagaactagaaagaaaatctagagactctttagaactgagagaaaagagtagttttgttggagtggtaggagttgggaagccttactggagtggttgagaaaatgagaggtgaataaatggggacacagtgtgtagataactcttctgagaagttggaagagagtctagggcaaaggagggtgtgcttttttttttttttaaagacaatacataacattcaaaggggatgctttttttgatgggagatattagagcatttttgtttgctagtaggaatgacccagaagtaagatccaagaagtaaggtaagacccagaagaagatatagatgacaaagtacagaaaagcagaagagagaggcaggacatgcttgagaaagtatggtgagatgggcatcccacagaggagtagggatatcttatccactgtaactgaaaggtaaagaagctggtgcagacaagaagggtgtatagatttggtggggaatgtagggaagctccagtttaatgaagtgatagcatcagctgatggtagggtaggaagcagagggaggggcagaaagacaggaaaaaagtatacaaagactatttgaggaaatgggaatgtgagcttagtagagaaatatattcaaaatatttatgaaatttcccttttcataagccaataacagttacatgaattttctaaaatgcatgttttatcaaaccactctactgctaaaatccctgttacccagcttctaagcatgctgtagagtttccttcatggtctgccatctgtctttatgtccgttctctccttctccttctatgcactggggtgtgcagtcctgctgaacgactaaggttcctagaatgcagcaagccctttcatgtctccatagcgttacacatgttcccctctacctggaaggctcttcggtttccatattgccaggataactctacttacaagaactagttatcacctcttcttgaaagccttcactaagcccacaggtagaaggtatttactaagtgtgtgttgaaagactggagatacttagtatgagccttattgaatgaatgagctctttgaacacagaagaattatccagagtctgggctgtatgtgcaaaacgccaaggactttaaaacttatgtggctttcttggtttatttactcatctgcagaatggagataataaacattatctcaattccctttgcagagtctaaaaagtgggttttaaatgtctaatatactcgtcaataaatgatagtttaaaaaatagtacttaagcaaagatttgcatgtagcaaaacgtgactgagagattgctttcattgcagggattgcaaggacacctgctgtatttaaaatgctgcattttcttggcataccatttaagacaaattacaaaaacctataactgaagcctgtttttccaaaaggtacgtttcctggtttggacctgtgggtagtgagtggaagaacacatttggtgtagaaggaaaatatgtatatattctgatctaccctgcatattttccattaaggtctccagctgcctgaacattaaggagctgtgccagtaaggaggacaagacctggtaactggttaaaagaagctaacagagctcatgataaggcttgccagcctagaggacaaactgccagttgtctatagaacagacaggacttgtgggagcatagtgtgttaagtggaggcccctgagcttagaaaaaggggctttcctattaggcaggaaccaagagaagcacaaagagatcatagtttataaatatgcaacagacacctctgtttggaaggaggcacaacacttattgtgggattgtcattgtgtggcttgcttttttcaataaattccctccttaaaaatttttatatagattgaatatttgtaaatagtgttttattattgatttacattattatgttagtaatgctttaattttcagttttgcttgccaaaaattttctaattcttgcttaaataaaaaaaaaaactaattgtatagcttggagttccaaatttagaatgagaatctttttgtgaggctaaattgttttgtaatgaaattaatcactcattaatttgcctcttaaaatacagacttatttaaaatctagtgggttttcttaattggacggagagacattcttgtaattcataagaagttatttatcttctctccaaatgaaattattttaaaatttaaatttatttatgtcttgcttttctgcaaaggaattgaggtggcttcctacaaactatattcatttatttattcattcttttctataactatttatggaattattagacatttaaaataaaacattaaagtcaaatagaagtgaagaggcagggctgggcgtggtagcttatgcctgtaaccccagcactctgggaggctgaggcaggcaaatcgcttgagcccgggagttctagacaagcctgggcaacgtggtgaaacctcatctctacaaaaaaatacaagaattagccaggtatagtggtgcatgcctgtagtcccagtgcttgagaggctgagactggaggatctcttgagactgggaggtcgaggctgcggtgagccatgatcctgccactgcactccagcctgggtgacagagcaagatcctgtctcaaaaaaaaaaaaaaaaaaaaaaaaagaatgaaaaaagaactgaagaggcaggaccaaggtaagataaaaccaagaaatggagaatgaaaaattcccaaacctaaatattgacctaataatgggattaaacacatgtaaacaccccattaggggaaaaagtgaaatatgatcacttagacagttttgttatcttcgaggattaagaaacatttttattcatacatattcctctagaggtgagtaaaaaacaatttctcatattttataacagcaaatacagtagcttcctttctctgtgatctcacttctcatcagggtttagctgggtgggcaactttggatcttgagtctgtatccctttcctacattttcagatccatgttgagatttcaatgtaaatactcatacttttactaatagattcagcatcttccccagagaggtcatgtcctctgtgtattctcttaatcaacaaaccttgaagctttcatattgccttcatctttcctttccccacatatactaaattttgtacattctacttgagtagtgcctttgttctcgttggtgccctttcatttctgttgctgttgtcccagctcagagcttactttcctcttgcctgatttatcctaataacttatttaatagcatcagttcttccagtgtcaacccccaccttagtcattctaaatactcttgacagaattctcttaaagcactactctaatcgctccctttccctacacaatagaatcctaacttcttggcataactttaaaagcttttaatgatctggctaccaactacttcccagcataattttccatttcttttgtacatcataggtagccattctctgaaaccgtccttgtactttctctcctttgtgtcatcactcataccattccctccatctagaatgcttttgctccttctattcctcccatttcagttgaatccagcaaatctgtactgagtgtttgctacatgcctaaggattgtaccaactactttggttccaaagatgaggataattatcctttccctcaaagatctcacagacttatgtagaagaattggtaaattgaagttgacatattgcttcctctataaagctttcctaattttcaagtttaaattaatttttctttttttcatatgcttttcttttttttaaataacactgacttgtacttttcaaatagaatgtgtgtatgttttaaatataaattatttcatatgccccattttattataagcttctatggcatcatgttatctgggtccttaggtctttaggcatgccacattataattctcacatagtaggtgttcagtaattttttgcaaggttgtgtacctggtgaatgtgctgagatgacatagatcatgtaggtatcactgtcaaagcagtcacactcagttgtacttttagggtcttgctttaaaagctgcttttaggtcgtattttaaaagtttaggtgcacctaaggttccaacaaaggctaaatgtttttaaacttttaagtgacgtgtgtaaccacacatggagttcagcctttgaagtcagcaggaactccacacagcatgtagagaagatcctggaacacttaggaagggggtaggagtgtggcctttagggcagggctccctaaaggataaaggagctgaaggtcaggctttgaactgatttgaagaaaactagtgtctatgttagaggtgattgcttttgaaatttgatataattctggctaatccattgtgaaaatggctactggttaagtagttgaggaatactgtgcttcctgtgcctctgtgattgctttatttcactaaaaatttgtattttaatatggctgttcgtgcttcaaacctcacatatttggaatatgaagtcacatctgcgctaggctccagtaggctgcatccctggtttatccagtccatgattcttctgctaatagccaagtggcattccatggggagatgcaggacacattgtttttctttcagatattaactctatgctaaggttagaggcacccaaactggtttttgtatatttatggtattgtcactcataaatttttccatacttcctttggatctacttttatttaaatatctctttgtggaataatgttttcatcatatttattatccactttggacatttttaatgggttccaaactcacatgactgagtgtcaaagaacatccccatcatcctagtatttggtatttgtgggttttacttcagtggtaccgttggtcatatatcacatatataggttctgtatttaccataacccaccatattttattcatcaaagatgtcacacacttaagatgtagcattattttatatacagctaagaaagaaaaagaaaatcattgttaattaaactaagatactttcttatcacttaacatttttgttttatagttaatggaaaatatcttgggttgtagaaagatttttatcatatgccactcttataggtatataaactataagatataaatgaaatacattggtaaattactctaaaaatttcttcacattgagtccaactctttatggatcttccttcagctcaaaattgttatctgtgtttttctacccagtgtcatcccccatgctactaagagtattggtggtgaagcatttcttaaaaggctgcttcttgcttgagtgagtgttattttctaagagacaggatctcttaggggtaatcagtttgggaattccttggtcaagccctgggtcctaccctccctgatgagggtgacaagaggtgtcctgcacacagctcctggcatgccaggcattcatcttctctgtggtctgctcaggccaagaggcagaaactgaactgccctcaaatacttggtacccagccaagtgatttttcctgttttcaaccttgacactgcaatctgcgcattgcgtgaataagtggaaattttcgagcaagaaatagcttcatgccagttctatttgaaatgttcaaaccacctatttaatggcatcttcacagccatgcataattgagttagagatgtcacaacttagacaatttttcaggcaggaagaaagaattggctctcttctaagttagtaccttctggcaactctggcttgttttatcaagcaaggatgagcctctctctatttaaaaacttaatttttgtgtaccctcttacattgattgagcagttgtggtgtgagaaggaacaaagatgcttctggtgtcctttgtacaatttcttttttttttttgagacggagtctcgctttgtcacccaggctggagtgcagtggcgcaatcttggctcactgcaacatctgcctcccgggttcaagcgattctcctgcctcagcctcccaagtagctgggattacaggcatgcgccaccacacccggctaattttgtacttttagtagagacagggtttctccatgttggtcaggctggtctcgacctcctgacctcaggtgatccgcctgcctcagcctcccaaagtgctgggattacaggcgttagccactgtgcctggcttgtacaatttcttaaactacaattgcagagctaattattcttgcatgtgcttttttaaggctgtgtacctaaacatcatgtggttggtttttttttggagaaaaccattttgtgaatgcttttggatacaaataattgctttccactctgaattaaggtatgtgaaaacacctggcacagagcccaggcactgtttcctttgccctccccatctggtgctgccctccccatgcctgaggagctgtgggctgcttgcttacagctcagccacataggatcttggaagagttcaaatttctccaagatctccagtgtgtgattttcactcttgctaagtgtgtctctccagcagcatttcctcataaggaaagaaggtagttatatctgtcagttacaattagctgtagaattgtgctgttttacccgagaaatcctcttctccagttatactaaccaagtttttcctgtactaatatccatatagaaacttaagctcttgacctgaatttttctggctgttcatttctcctttttccacttacttaattacaaatggattcgtgtcatgaagggtaatcattagttctcactgacatatgatgctgagttattgctggtaaaatatttcactgccctgccttattgttattgtttgaaaatgtaaagtaatgcttataggcaatcaatatctcatgctacctcaggacagaaattgaatcctgaccaatgactttcagtttaatttaaccttcatctagttaaaagtggagactgaaaacttttacatgaactcaagataatttttagattagggaagttctgatgattcctgtaattttaattacagtagctcatatctgaccctcagttttcttcactaatcatttgggttgtaaagctatagttaggctcattagacagagtgcagaagtgcagatatagtgtctaggaagatataaatgtccattgaagaactagccatggaagaactatccttgctcagggaagaactagccttaactaggtctggtggcttgcttcaggacctatttaaatactagcacgtttgctattacattttccattattctgaaaaaattattaaataacaatatccgtttgacatgaattgccttttatattccttactgatttaaagtaaaattggggtaacatatgatttttatagactctcactctgttctcattaagaaggcattactgaagataaattttaggtgggaccaattacagactaatgcagttatatagtcattgtgatctagctgaagaccaggagtcttttaatcagttaaaaacctctgcagcctgggcgacagagtaagactccctccatctcaaaaacaaaaaaacaaacaaaacaaaacaaaacaaaaacaaacaaacaaacaaaaaaaaaccctctgaagtctctcatgcactattctgtgttctgcaaaacgttggccctaattccctgaaataaaaagtgaggaattgatcttcagtaagagtcttttgaatgcttattatgtgcctatcactttgcaaattagattatgtatcaaaaggaggtttagagtagttcttgagctcaaaattatattcttctgaggaaagatatgacacaaaacaataaaaaaacagcataaggctagaaaaataaaataaaatgcgaaactgaacacaatcaggtacccaaactgcctgtatttgtaatgtgaagtccaaaggggaataatctgtgttgaaaggtagtacccaggaagagtttatgaaagaagtatcatttgagatgggccccagagtacgacagaatttgagaagacagagaaaaaggtggaagatgtgtctggagaaagaatggcatgaataaacacttgaagacatgagagattctgaaattttcagggaatagcttgggcagagggttgactaaagaggctaaagaggcaagatgtgctaaagaggcaagattccaaaagatctcaaatggtaaaaatcaaaagtttgcaatggacatcgtcagaaatattgggctggagagggagatcaggaagggatcagtacatgttgtcgagaaataagtgacatgatgtgcaattatgtatgtgctcaccactctatactcaacgcccagagccccaggatacagagggtgttattttggcaactcaaattgacaggaagcattgctgtcagggacctgatttttcaaaacactaaacaattctttataaagttcccaacaaaacaaagtatagtcttctctcaatttacatgatagttgcatttccggaaaattcaatgcattgcctaaatctttggtgtttctggataaaacaggattaggatccagcccagataatttcacctacctgaatgtgcagcaaaagactgaaaaatcatgtaggatgtgggatcattgttcagtgcataggattctcgcaagaactgtaggatgtttaacattgctggtcctatgaacaccgtgaaacatcctcacaaattttttaattggtcaccttccccctagtaactattgctttatttctatattagtgaccatataagttacataccctaatttgccttttttggttaaaattttaattgttgctttatttgtttttacttgctaaatagaatatttaaaatgtattttctctggaatgttagattctgtgggtttaagaggtagtaaattatttctttattggttactatataagttacatatcctaatttctctttttctgttaaaattttagttgttgtcttgtttttttttttttgctaaatagaatattcaaagtgtattttctctagaaagatagattcagtgggttaagaggtagtaatttttttttttttcaatttagccaacaattgctaagcctctaccgactgccagcctccatgcagacgagctatggccattgagctcacagagctagctgataacccatcaggaaaggaatgtgataaggtgtgtagggagaatttgagagatgacaaagcattgtagagggttgagggaagatcagggaaaatgacagagatcatcacatttgagttagtgcttaaagaataattttaacaggatttaagagtgtacttctttataacagaaagttgaatttgaaatgactctcaaatcctattcattatataggctttgcagtgaattaccaaatggtatattttgagatgaaaaagcttctttgttatctcccaccccaaaatagtttttcctttttttttcctttttgcagttctccatcatttgttttttcatatttagatctggtcttcctaaagagtttatgaggatagaaactgtgccatatactttactggatctcctgtagtgctaggcatattggaccttagatattttcaaaataatgtacgtaggaatgaataagctattcttaggcgcaaattgtttgtttattctttttgtattagcatttcctaggaaagtgaagtcaggatgttagtaatgaggacaccaagaggatgtccccgctagtctctcggcatgctggccagaccctggttgtgctctgtctgagtccacagaatcacattgcttttctcctagtccctatctgtaggtaagagaaaatgtggaaagtcgatgtttgctctggaagttatagaaatttccactcagaaggtccttctttctgaagaaatgtttgtttttttttaattcaggtccaatttggacaagatactcttgctttttcgagtcagttgaagagcaagataacaggtgaaaagtatttcaagagtttagatcaaacttgataatatttgtaaaaacatgaactgtaaagtattacagaaattgttattcttttgttgttattaagattgaaggaggagcagaatcatcccataattactcctgggggtctgagtcttgtgtttgattagctttaactcacattttgttattgtagttatcagatggatttggatatttgtaagatataaaggtgtctattctttaagaagtcaagttgaatcatataagataaagagatcttgaagggagcttcactagctgtgaagttgtccaatctctataagtgacacatttctcatcagaaaaatgatctgtatttcccagggtgttgaagagttcctttagtgggtttgaagggtacagcatggtgcctgacctgtagtaggtggtccataaatgttagctataaaatattactattatttaaaaggttatttaaaaccctgaattcagcagacatttattgaacacctactgtgtgtcaggcactgttttaagagctagaaaaaagccataaagcaaacaaagattcctgtgcttgaggaactcaggttttaactggggagatggataagcaatacccaaagtaaataagtaaattatgtggcagattacaagattattagggccatggaccaaaggaaaggcaaagcagggtaagggggatcaggcatgtccaagaagaagaggtgagatttaagcaaggacttgagggaggtgacagcattaattgtgtctcatctcctcagtcaagagttgatgtttcaaatggcaagataaatgactgtaaaaatgcctgatgttcttaactattagacttaaaccatacgaaaaactgtacgctttttcttttctcgttctccacgaagtaagaaaatactgtccctttctttttcccctcaatgacaataaaataagtatccctgatgatattatcaaatcctttttagaagctgtttcctttacttcctaatggatttagctctaatccaaaccagaagcacattttgagtcttttctgatatgacattattacagtgagtggtttctatttttcttctaagtgttgcttgaacacaggaaaggaatgtgagaagacctcttgccacagctgaagtatatattagagtacattatttagtaaacggtagacagttctttccttgaaactcatttgaacatttattgtaatgtgaactaagttttttcaattcctaattagagatggtagtttttctgtattttaaaattggatatcacatccatgtacatatatacaaacacacataaatttctcagatattaaaatgggatgtcactaatatgcatatatgtatatgcatctatatatacatatgtggatatgtgtagatatacacatatgcatagtttagttgattaggttaattatctcttaattaatttcttaattatttcaaagaattggggaaaccagcagtttttatagttaaatattccttgaaatgaaattaattgtggcattggtacaagtcaaaataattcagtgttttggtagtggtagtatctgtgatagtcttaggcttagatattgcagtgacaaagtatccagtggtagagttgatgaaattgtatttttatagacgtatttgaggctattatgcttttatcatcaaaatataatattcatatagttcattacatggcaaatgcacatgtatgattagtgagcctggattagtagccttgctactcttgtacttattcagccaccttaaaacataatgtcaacttttattttagatcagggggcatatatgcacgtttgttacatgggtagattgcatgatgctgaggtttggagtatgaattatcctgtcaccccggtagtgaacatagtacccatagtatccagtaggtagtttttcagcccttctcccttcctttacttccccatctagtagcccccagtggctattgtcatctttatgttcatgagtacccaatgtttagctcccacttataagtgggaacgtgcagtatttggtttgctgttcctgtgttaattcacttaggataatggcctccagctctgtccatgttgctgcaaaggacacgattttgttctttttatggctgcatagtattccatggtgtgtagctatcatgttttctttatccaatttactgttgatgggcacccaggttgattccatgtctttgttactgtgaacagtgctgcgatgaacatatgagtgcatgtgtctttttggtagagcaatttattttcctttgggtatatgcccagtaatgggattgctgggccgaatggtagttctgttttaagttctttgagaaatatccaaactgctttccacagtggctgaactaatttacattcccaccaacagtgtataagccttccctttcctctgcaggcttgccagcatcttattcagccacttctagagttcattattactttgtctgaattgtttgtaccaaagttacttaaaaagccagtattatttcattgaactcattgtgctgttgtacctttttttctttgtctttttaagatgagttggaatatagtatgtaaaaatgacacataagttagatttggcatctgaaggagtaaaccaaatatttactggcaatagagtgtgccatagcatttgagagcattggaatgagcctgaatacctgggttcaaatctcaccttgccacttactacctggacaaccttggggaagttaattagccttctaggctttactttcctcatctgcgaaattataaaaatagtagtacctaccttactgcattgttttaagaattaagtgagttgctatttgtaaagcacttagtacagtgtttattaaatagatataaataaataccccagcaagtctaaaaaaagagttgtctctcttttttttttttttttgagatggagtatcgttctgtcgccaggctggagtgcagtggtgcgatctgggctcactgcagcctccgcctcctgggttcaagtgattcttgtgcctcagcctcccaagtaactgggactacaggcgcgtgccaccatgcccagctaatttttgtatttttagtagagacggagttttaccatgttgtccaggatggtctcgatctcttgaccttgtgatccgcccccctcggcctcgcaaagtcctgggattacaggcgtgagccactgcgcctggccaaaaagagttatcttttaaagatacgtacttacatctttattgatgaaatgatgggatgtcttagatttgtttgaaagtaatctggtcagagagtgggacatgaagtggtgagacagtaggtggatcaagatggctcatgggctgataaccattgaagtggaatataggatttattatactactaggcctactttatgtaagcttgaaattttccaaataaaaagtcaaaacaaaaaaaggacagttcacttcttccaatgttctttccttttttttcttttctttttctcccctaaatctggcatatcattcctgtcttttggggtatagttcaaatgctacctgttgtgaagcctccttgataaccccagccacatctcatctcttctcttctgactcatgcagccccctggactcttcttgagcacctatacatgttgtggctttgtatttattcctgagtgtcttttccttcttccaggctaacctccaagtggattaggatcatgttagtgacttccagggcagatacctttctcacagtaggtgcccatcaaacctttgttgaaaaaatgacatttattgactataatctagaaagagcaaaagcaattattttgtgtgtcacaattactactaaagtactgtgtttggggatgaaaggttgttattcgaattttttagtggtagtttgaaataggaatacctgtggctttatattaaaatgtttttgctatttgggggcatttctttttattcttttcaaagacttcatttaggaagttaatgttgttccaggcgattagcaaagttacaaatatgtccttctaattctggcatgttgagaatctgaacatgtgaaatacttgtgttctattttatggttatggaaagtaagatttttttcatctgtgggcccacattattttttctatttactgacttaaatgatgcagagaagagtctagtatgaaactggaaaaagttaacaatgaaaacctaaatcacagaactttgttttgctttaggatacgtcctgaaaccatgggaataaattataattttagccatcctcccctccctcataacatagataagcttttctttaggcatgttcttaaaacaccatatgtaaaacacctgttggtaagttaaagaatattttaaacccaaggattttatatctattaaacatattcttaaatgaaatgattttataaagcaaagactattttagagcaaagaattctccttaacctctcatttaaatgttttgcaagtttgcttgtttatcagttgaacttatctaaggtgaatacttcattcattttagtctcttctccacaacaaatcatttttgttgaacttcgatggaagtcaagtagtgaaattgggctaccttgagtttcacttcggcctcctttctatttccatcctcaatggaggtgctaattataagtgaaatagtttaaaactgatactaagagcaaaaagtgccaaagaacataggtaatctataaactaaataatcaaattcaagaatggggttatattgcctgaaggcattattgccatgactttctcacttgcaatggagagttaaaaaaaaactctgcttttgatttttctccacttgctgctctgttaccaccccagtggcatgttctcattaacccaattccttgacctttggctattacactgaagaattcaaattcacaagatgtgaattgcctcattcatatctacaaggtttgaatcgtggttaagacttagaccgggtgtctgattatgaacaggctgtaagtgagagtgggtgttcctttgtgaagatctgtacttgctcagctgtattgcttcgttgactcatttagagtttctatagtacttaggacaatgattctcagcacagtcattgtggcctatcatgctatctttggctgacaaaagtgattctgagataatttaaaagtaaagtaaaatttttatttaaaaatataacacatgaaataatttaagaaaaatgaaagagtaggtattaaagataagacttccaactccccaaaagtaaaattactaacagcttgcagaagctttaatgaaattatttttaacacagattgaaaaaaaccatgtgagatcatttttctctatagatcataattccttggggatagggaccttgtttcctattctgttgtatctctccatggcagttaataaggtactttgtacaaattgaagagacagaaaatattaaaattcctttctttttttttttttagaaatttggaaaacctcaaatctgttgagaaattggatttttggaaatttattcataaaaaattattgtagctgaaacttacctctctcagataccaagcatgtttctgtagaaggatctgctggactacctctgtttccctcatgaattggagagatttgtgttaagtgacagagagaaagcaagccctaatctattcccttctttttctgcatgggcgtgaactcagattgtttgatttgctacccagtggagagccaggtggccataactttattttcttttatatcatatttttatgtgaaaagacataccattagtacccttaaggaataatcatatcgttttaatccctagtggtacttgggtactgttgggaccttcatcaagcagattccaactacttcaatgaatgtatttctgacttttcaggctcaagctttcttttttttttaatatatgaaacaaaagtatatgaacaaatggaaataaccagtgggaatgaatgatccatctgattagatcctttgtcattgtgggaaattattacattattccaacctgtagaaatttcctaaaatccccacatggagtcccctatgttttctgtcagagtgtatgtagttatgcaagtgcacttaattttatggaacatcctcatgattcaatctgctgctcccaaatcaaaactaatatgcttttggcttatgtactagtttgaatcatttatattattctgctcacactcagtaaaactaacatatcttcagggtctgccatatgaaaggtgctgttttagttgttcaaagaagcaagggctggaagaagttagactgttcttcctttgctattgctttcaaatatcaaatcatcacaagtttgagtgaaaaataatttaatgtattgagtagctatgttttaaaagtctagggttctttttgttgttgctcagagagaagaattaaagattatatgatgtactttgattagtgctgtctactgaaaatccacaccactttacattattttgaatgtttgaaagcatgaaagtgttcacagttgaatgtttccaagtagttgtcttaatattttatcacttagaagtcagttacagataatggaaataattctaactatttaagaaaaaaatagaataataaaaacaaaagcatttaccataaggaattaggtgcttactaatctaatcattggactctagactgggcctctaagaatggcttccagaaaggcacagtggactgcgtgccaggggcattgcttccattattactcctaggaagctaggaactaaaaaagcctgcatgtcaactgctggtttcaaatcacagcaccctagccacaaccaggagtcacgaagcaactgttgtcttctgggatattctactttagctgtgattcagggatcagactgctaccagcattgttagcttcagagctgtctgctgcctgttagatttgcacaagcaagacaaaaccttgggtgcttcttctcttccgcttaactctgaattcaagttttatggaagtggcgctcatggtgaaacccaaattggaattcaagtcttatggaagtgcatcttaatggtgaaacctaaattgtgttgagaatgctagttacaagggagtctgggaaatgaggtttttagttttctggcatctgcagtgtaagaaggcaaatatggagattggaacagaagttgagctggccaatgtgctgtatcagccacagatgcttttgtgttatttcctgtgatggctagaaaacaaacttagaatctggctgattgagtaaggaaacaattttcagatgtaaaccttgtatattacagtctccaagtagatttttaaaatatatttttttgtttgcattatctgagaatccagaagagcatccagtaatcagtaattacatagtcagatgtgccaggtggaatgattcaggtatctctatgtatttgtagcttgaatcctgtatgtcttctgtttagaacttagccatcttttgaaattaagcttttttccactggtgattatgctagtgcatttaattgggattattttttggcacagcgatcattaattagagcaaatggagcataagcaacgttagttgaataaataatgaatttaaagagtctatgaaggttaaatagcatactctggaatgttctatgaagtaatttttcctttccatgctacatactgtcaagataactagtctaacccaaggttagatagaaaacaatatgtagagtgtttcctgcaatattttcatgaaaaatatatgtgtaaaaatgtctaggatggtctaagagaaaatatttatattgattactgtgaattagaatagattttttggtttgtttatattaaaaacatttaatcccatgagcacatcatcttatcagaaaatgattccaaaaagttcttctgtgagttttatcaaccaggagttctattcaaaatacataggcagaataaatagtaaagtaaaaaaaaaacctatgtgtcttttatttctctgctaactttgaatgggtacatgtgatagactttaattattttgtggctaatttattggaaattgttttttggttgggaatacaatgtcttttgttgatatctccccaagtctcaggtcataatcataaattatttattttattgaaggcagttatgataccatcttgtcacttttcctaataattgtataataataagttgtattcacattatattgatctatttactttttcagttaattccgtatgaaacatttgtttactaagatatcaaatcaaccacaaattaccattcatagataaaatggaattaattcttaatgatgtggcctttttaggacatagttaaaattctttaattttgtgattatgttatttagtatacattaagtataatgtagaatatacttatgatattggcccttctttcaggaaattaaaatttaaggaaatgggcaatgtatgatgctatttaattatgaaaattctcctgtgacgttttgtcttttcatgttaggcctaagcagagggcctaaagggtgtggttgtcagttacacttgggaaaatttataggagtgggaaattctcaaatgagatcataggggtctccaggcagagggccaggctgagccacaagcagctccatagagccagggtcagggagctggagagtcaggatgaaggtcatgggtaaaatataattctgggcattctgctgaaatggcagacctctcggtacagtatagatatgcaaatgctaacacccagagtgtctgactttgatgtgctgccaagcacctttggcctccagtgggtgctgactgaattggagagattccagattcagcaaagatgtctgttagcagaggaacaggattaatgaagggatttgtccctctcttacctcagtttacttaaggagagggttttattaattggcgtgaaaacgttgcataacattttaggaactaaatcctagaatttcttttaaaatagtacatttacaataattatcaaagattttttctttaaaattattttttcagatctagagttattttaactttattttgaaataatttcaaacttgtagaagagttgcaagaagagtattaaaaccctcttgtggccgggcatggtggctcacacctgtaatcccagcactttaggaggccgaggtgggcggatcacctgaggtcaggagttcgagaccagcctcaacatggagaaaccccatctctactaaaaatacaaaattagctgggcgtggtggtgcatgcctgtaatcccagctactcaggaggctgaggcaggagaattgcttgaacctgggaggcggaggttgcggtgagccgagatcgcgccattgcactccagtctgggcaacaagagcgaaactccgtctcaaaaaaaaaaaaaaagcccttttgcataacaactatgaatgctttgccacatttgctttatctcgttttgtctctgtctctctctatacacacacacacacacacacacacacacacacacgcaccatttaagagttaatggtcaatatcacacccctttactcctaaacatttcagcatgtatttcttaagaacaaggacattctcttatataaccacatagatatacagcccatattcaaaatttgcctattatcccaataatattttttagagcatatttcctcttggccaaataagtcatgactacatattacctttagttgtcatgtcttttaaatttttaatctggaataatctcgtaactccattttctttcatgacattgatatttttgaagggtatatgccacttgttttatagaccaatcctttattttgatttgtctgattcaatattttttatcaatgactttatactttaatttgaaaaacatggaaatatataaggaagaaaacattcacccttgatcctgctgtccaaggatacttctgacatttagacatacttccatttttcctatgactcataaaatcagttacaaaattgaacatacagaataatcccatattttatacatattaatacgtataaaatatgtatagtgtatacatattaatatgtataaaaatatgggattattctgtatgttcaattttgtatctgattttatgagtatttttccatctcattaaatgctctttgaaagcatattttcctggctccctaatgttctttattacagttacactatcatttatgtaaatactctcttatcattggatatttaaattgtttctatttttcttattacaaaaacactgtgactgcatgcagtggctcacctgtataatccctgatagtcaggaggctgaggtggaaggatcatttaatgctagaggtttgagattagcctggacaacagagtgagactccatctctaaaaaaacaaaaaaggaccacacacacacacacacacacacacacacacacacacacacacacacacaccctgtcagaatgaataccatcaatctataaactgcatttgattcctctttttcttttttctttctttttttttttgagatggagtctcactctgttgctaaggctggagtgtaatagcgcgatctcggctcactgcaacttccgcctcccgggttcaagtgattctcctgccacagcctcctgagtagctgagattacaggcacacaccaccacacctggctaatttttgtatttttagtagagacagggttttaccatgttggtcaggctggtctcgaactcctcaccttgtgatctgccctcctcggcctcccaaagtgctgggattacaggcatgagccaccgcacccagcccctgattcctctttttcctaaaattacttaagcacatgtatattaaacaaatgacttttcatagtggacttactcataaaccagtaattaaagtcttgatgtgtgcagaaatgcaaaacatttcccagtctgatttttggggcctctctcttataagggtttgctttcccataatgtatcgtctgctcagtgtgcttgccacactatctgtggtgacaatgtattgtcattctcttggtctgactgctgggagatcacagggagctgagtgccgctgagttaaacagatgttcagcatggctgcatcttcaaagttttgtctggttccagccctgacgaaacttctagggccctgagagaaagagaaagtttctagttgaagtaatatcctatagtttgttagtggaaacagaagcacgtggtttctgatttggttctggtgttctctttggagatttgtatcagtgatgaaaaaaaggaaaggttggttaagtctgttgcctcctgaagtggttctttttatcagaataaagactaggcatcatctcctctatgaactttttcctgacactcctgttcatcttccatgctggacccattaggattaatcaccttctcctttgagttacccatatatgttatctttaggtctgctacagccttcgcactgtcttacaactaattgtatataagtctagcttccctatgaggcactgggttttatatgcattagatccatttgccctgcaataagccaccccaaaacttagtggcttagaacaatagccattaatttagctcatgattctgtggaatcagcaggttggtctgggctcagtagggctcagctgctttctgatgggactcactcatatggttggctgggggctggctgattgatgactgggatacctcacttattctcttgtggtttcccatccttcaacgggctagttcagacttgttcacatgatgtcaacagggttcccaaaagcatcaacagagcatatcctttaatgtacaagaactttcaaatttctgcttctgatacatttgcttctgtcccactgtccagaacaagtcacatggctaagcccagagttattgtgtgagagcactacaaaagggtgtgaatacagggatgtgtgagcaaatggggcattactgcaatcagtccactacatgttccttgatgtcagggttacatctcaaccatcttttcatctctagatcctatcatgttgcttggcacaaggtagttgcttggggaatggtgaattgatctatacagttatctagtccgtttagcatcccctcaaacttgggtaaactccagggcacaaggagggcattaggcaatgttcttagatgctgagctttaagggagtttttgcagctggcttttgatgaggaaagtctatggagagaaaatgggtatggcacttggtaaaaaaaaatcgggagattgttttacggaaaaataaaatttcttacctcctaagcaaaacatcaaaacatcaaaattttattttttacggaaaagtaaaattttttacctcctaagcaaaacatcaaaacatacatacttatgttgtacttttatttttctttcaaagaatgttcctcatgttaatttaatctggctttattttgtgaataactagggagagagtacatagccatgtttgacctgggccccatattctcagagtcaaggcctctgaaaaattttttgaaagtttgaataaccaggaatagaatcatccttaaacctatgtgatgcgggctgctttcttaggcctaaaattttagagggccttgctgttttttctggcgttgcctatccccatcttgctagtattggggtgtcaaagatgtgacaggggatatgcccacctagagcttgaacccttctaccttctaacccatgtagcaggaaactgggactctaaaattctctgcctaaatgggctcaagctgctttcaggacctgtgtgggctcctttgcttttctcctaaaggcagactctaccagtgtataccctttctaggcccaaggggtggccaagggtagctgtttgcacagtgagggttagggggtggatagatcttggactttggtttggggtgcttataaccttgctttggagacccctgagggtacaggatgaaactgagagtaggatgagatgttgacgggccttaggctagggaccactttgaccggactgtcaagattgggggtggcctgattagggatctcataaggctgttgacaggagtggaatcttccatgggagcaatagtcagatttgtctcaacttaaattctgggaattttgctaaaataagaatggcttctgagatataatgagctaaacctgaaatgttggttcttgtaaatacatggtaaaggcgtgagattagaatttctcttttaggaaacctgtcaaattgttaagctccttttcctcttttatttgtgatctaagtgatttgtctatacagcctcacagatagtagatccagtcagtaccaagtacatgtgactttagcgtttgtctataaatcagatggccacttaatgggtatataatagaagggatggtaatagaggttcatactgaggcatttaaaattgttttaagaagattcagagagggaaagtttgaggcaaagggaacacaaaaaacaaggggatactggtatcactgtggctggaacaaattttaatgatgcttttctggttcccacttccccaacccattttttttttaaagaatctatggccaatcactgcttgcttgaaaaattgcctttgttatttacattatgcttttaggaattttagaatgatatgagagtctgtaatagaagagtgagaatcaaagcttattgtttccaggctatggcttgaatttgaaataagaaaggcaaaaatacaagttttaatctttctaacctgaagattaggttaagaagtcattagtagtgaacaagtgtctagtaatttcatttataaggcatttgattaatgactacactataaacattatttccaatgcacacagctctcttaaagccaactttttttttgtgagttggcacagatttgtcatcgtttctggtttaatgttttgaaagagtcattatacaattccttagaagaaagttatttccctttggttatagtaaaattgtattttaatgtgatgtgatttgataataacgtaaaatcgtcaaatacaagggcaggagaaggtagatttattaggtaattgaattactagagatgctattgctgtgagagaaaactcaattacctgtgggctgtggacaaagagcttcctatttcctgatggggatctaaaattgattagcttcaggcttgtagaagtcttctgctattattaatagaatcaagaattatagaaatagaggaattttagaaatcatctaatctactatcctcactttaaaagtaaggatattgaggtgaaaggtcccatgtccaaggccacactgcagtcagtgactggggccagaacccaagactgttcccctgaactagggactgttacttcgaaatacagacaatatctgttcttggtccatagagtatatattttgagggcagggtctttcttaaaaaatgtcttctgtatactatttaaaagattttccatagttttcatggatgcataaactataaagccaaattcttggcctgtttataagttctttggtttgactttgttattgccagggtatctcagtgtagcaaaataactccattctttatagatctttttctgatgatttatgggaaacttaagataaacctttaattaatttatttttttttgtttactttgttgactggataaaattctttcacgtggttcaaaaaaatctctgctgtattttaacatttctttgataatctctaaacacttttgtgtaacttaaatatgtgtcaatgtatatgcatatctgtagatttgagaaaatctggggatttatttaattcattattaatttattgtaatcaagttggtaaattattttaaggcatcatctaatatgttttttttccactgtctttttttttctcaatagggatgaatgggaccttcaggatgtatgtaaaacaatccttataggtgaaaatctaattgatttttgaaagtcaaaaaggattttgattctattatgttctctgaaacctgtcttgtatttgaatacccatatggtcaaacagttcttggttatatcctactgaagctttcttcttttttttttttagtctttttttttcttctattctcttatagttagaaatcagcatgttttgacaattatatattaagaatctaggagttaagtaacagaaatttttctttatcattagaaaaatcatttgcttgtgaagtgtgaaaaaagggtaatgttatatttgtagtagagttttgaagccagatctcaaggctatacagttaaaggatagtggagctgggaataaaaccaaggtcaaatgaaattcattctcacttagagtagggggggaataatgtcatttccccagagaacatactctgtagctattagaaacatttaaaagaatttttaatatggattataaaactggcatagatttaaaaataatagcatcctaatgtcaactgggagtgtaattctgcagtatagaggaaaggatgcagaaataggtctcaatctccatttgcttggcctcctgacctcgagtaaataatttaactgttttcagtctcgggatgataatacctgtttttctaaacttctaaggttattatgagggtcaaatatgataatacaacagtgctgtgtggatgtgttagcatgaagccagagcatctgatgcattcttgttttatcttgccagcagtggtgtcatctctttgaaggtggacaaagcagtggggagaattgcaattctatatcttgaaataactaacaaagatatcttggtcataaggtcttaaagaaattctgggaaaaggtgaccatataagagtttataatatcaaagcaaggcagcattgggtatcatttttttaaaagtagattttaagaagcttagaaacaaagtagatattttagaagggattgtgactcatgaggatggtacgtaagaagaaaatgaaattctgattatttacttacgaatgattttttggtttctttttgagacagggcctctctctgtctctcactcaggctggattgcagtggtgcaatcacggcacactgtagcctcaacctgcctggctcaagtgatcctctcacctcagcctcctgagtagctggggccacaggcatggaccaccatgcccggctaatttttttgtttttgtagagacagggtcttgctatgttgcctgggttggtctgcaactcctaggctcaagcaatcctcccaccatggcctcccaaagttctgagattacacgtgtgagccactgtgcttggccgtgaatttaaataggagagagaggcgtatggacaaggtgatttattaaaaataaaacaaaacaaaacgacaacaacaaaaaaccatggactatatttatatattctctagccataaagtatgtgaataatattaaaaaaatcaaggtaggggcatatacgaaggaaaaatacataagtggcttttaattaaaatggagctggtgactttccagtagtagaattggctttaattaaactatgcatttaacagaacatacttcaaagttaaaagaatgtctactagctactccctcactcttgacagaaagaatttgcatgaaggtttaggtatgatagcgtcagagaggctaaaactgagaattggccaaagtttttgaaaaggttaaggcaaaaacaaaaacaaaaatgggttaaagacaggagaaagaattttttttgttgtttatctagaagtcggaagagagaaagccattgattagggaagatggaaaaggctctttaaagctattctttaccggaaatgtattagcagagaccgactgaacagtcatctgggataattgcagaaggtgaaagttgggctttaagtatctttatttcacccattaatatttaatacatatagtatagctgacatgcttacatggacatctaggtgtgttgtagctgtcctgatttgagtttaagcttcattttgtgttgctctcaccaagatttaccagccatattttacagatttgtagtgatatcaagtgctgagaactaggataagaggaaaattcgaagagaaaaactacaagtatatccgcctttattctccgaaccatttctcattatttagagtatgatgaatgaatcaaacaatgatcttgggtatagttcttcagatatctgttctcaaacagtgtgggatctaccaattagaatgctaattgggaactaaaaataatattcatagtaaatctgctttctggttttattttaagacttggctttttaaagttttctccatccttgtttggaagtactcattctgtgaatttatatagaagtagcatttctggccaagcagaaaaaccaactagttggttcattttcctagaaaactaccagatgccttcctagagataaagcataaccgagtttatttaaaattgagttggtgacttccttgtgtaaaactgactttaaaatatgcatttaacaaaccatatttcaaagttctaactagctacttactccctgactcactgaatgaaaaagtattcatataaagttttaggtgtcagttgaattaacttataaccaacttccactgggaaaagatatcattaagttgtttttttttgttgatactgttcctgaaaaatgtatttgagaattataaaggtggcatagtttatgttagaatactactaataataaccttcaattctgtgtgtatggggcatgggaaatatgtatacgtctatttaggaggattatttttgtgatgattattagagaccaatcacagcagcaaaaaacaaaacaaacaaacaaagaaccaaacaaaaacagttatgcatcctgaatgaaaggtaaaaataatactggacatggtttcttgaactcctggcctcaagtaatcctcccaccttggcctcccaaagcactgggattacagatgtgagccactggcacccaactgggacatagtttctaaaagtcactccacatggctattgaaaagtcttgtcttaaaaatagttggtttctgaaaatcttctcatataattgacttcatattgttttgcaactaaattgtgctggaaggacccatagtctacctgagagaggaagagcatcaaagtgaaaaggctgcaatgaccaatacagtctcctatataaggaaggtgaaggaggcaggtgatgcaaattacggcattagagatggggctgcaggtatagatttggcagtcgtcctatacagtaaacatcacagctttttccaaattatttttttcaaatgaacgttttctttaagaagagttttagattaatagaaaaaattacatgggcaagtgctaaaaaaaaaaaacagaaaaattacaaagagtacccatatatgccacacttgtttttgcatttattaatatcttacattagtatggtatgtttgttgcaattaatgaaccactacttttacaatattattaattaaaatccatattttattcagatttttgttgtttttagcctgcttgcctttttctatccaggatcatatccaggataccacattacatttcatcatcatgtctctaggctcttcttagatgtgacaatttctcagactttatttcttatgaccttgacagttttgaggagtactcattaggtattttataaaatacctcttaattgagatttctctgatgtttttctcacggagttatgtgtttttgggagaaagatcacagagggaaattaccatcttatcacatcatatcaaaggagcatactgttagtgacttagcactgttgatgttgtccatcatcacctggctctggttatggttgtcaggctttccctttctatcctgtattctttgtaaggaagtcactgtgcataacccacacttaaggagtggggagttatgctccatctccagagagtgtattgtattatctacataaattatttggaactcatctgcgtgggagttttgtctattattctccatttgtttatttattcaataatttatatcagtatggactcatgaatagtttatactttaggttataatccaatgctactttatttatttatttgctcaaactgttcccgtgggagctctttcagttggttctatgtccgtttgacatagtctcgtaattgtgtgtgtgtgcgtgtgtgtgtgtctatgtgttttgaatacttcctaattttctgtcactacaagatgctcctggatcatcatctatatatcctcccccagttctataattgactatttttccaaggagccctggttcttttgtttggaaatggtgttagaaaccaaaatctaggcactaggtgtactcattgttattggattgtagctgcttttaggctctctcagctgacagagcaagggaatgtatttgcatataccaacctgtgtatatacacatatctacaaatatttctgtatgtaatcatctgtatctatgttaagctaaatatgagtttagactgatgtctccaattctaattcatcaccacatggataattctagcctcctcctcttgcttacctataacttcccattctaacagtcagaaacttggttgccatccatccacttaattgttcatttatgtatacatgtataacagtatcagaattaactggtatccccagaggcaagaactttatcaactacagcagcagttcccagcctttttggcaccaggggctggttttgtggaagacaatttttctatggctggctctggcagggagtgttttgggatgaaactgcccatgtgtcacttagttgacctaaggcgcatgcaacctagatcccttgcataagcagttcatgatagggtttacactgttatgagaatctattgccaccactgatcagacaggaagcggagctcaggtggtaatgctgttgcccacgggtcacctcctgctgtgcggcccagttcctaacaggccatggataggtgttggtctgtggcgcaagagttggggacccctgaactagagtacagtggttatgtgtggttccttttccctttagtcttgcagactccactcatttccaaagttacttaggtcaactaccctctccccttaccccttcagtgaggttgtttcatacatttgcaatagagttagactgtctgttttgtcacattctgcattctattctgggatcctttgatgtccttaattatttttgtttaaattgcatggactaaggtttactttttgtgctgtaaagtttcataggttttgacaatgccttgtgccatgtatttgccaatacatactaagatagtttgagctatttaattttatattattatattgtattattttatgttatttactagtacaatgcattgtcaaaacctataaagtaaggttttgaaatagtccaaactattttcaattatttaatatttgactttttttttttgtcttttgagacagggtctcactctttcacccaggctggagtgcagtggcttgatcacagttcactgcagccttgatttcctgagctcaagcaatccttccacctcagcctcccaaataactaggaccacagatgcacaccaacacaccgaactaattaaacaatttttttgtagagatgaggtctcattatatcacccaggttggtctcaaactcctgggctcaagtgatcctcctgccttggcttcccaaagtgctgggattacaggcatgagccactgtgcccagccttgaccactttttttggaccggcaattttgagtggttcaatccaatataagttgaaatttaagccaatctattatttacatgcagttacatgaaatagctaaaacttttgagtaagtattgttatcataaagatatctcataatcttaactacatagttatatatatatattttttctcctgcctcagcctcctgagtagttgggattataggcacgcactgccacaccaagctaatttttgtatttttagtagagatgggatttcaccatgtcggccaggatggtctccatctcctgacctcatgatctgcccacctcggcctcccaaagtgctgggattacaggcgtgagccacagcgcctggcccaatttttgtatttttaatagagccggggttttaccatgttggccaggctggtctggagctcctgatctcaagtgacccgcccaccttggcctcccaaagtgctgggattacaggcacgagccaccacacctggcccccacctttcctgtctgtgattcctcccactgtccttgagcagggaaagttgtgaaaagacagtcaggatcttctttgccactggaaaaccggaaagctctggtctttcctcaaaagctatttgctttatttttacttattttattttattttatttatttttttgatacagaatctctctgtgtctcccaggctggagtgcagtggcatgatctcggctcactgcaacctccacttcccaggttgatgcaattctcctgcctcagcctcctgagtagctgggattacaggtgcccaccaccatgcctggctaatttgtttgtattgattgattaatttttattatgcttaaagttctagggtacatgtgcacaatgtgcaggtttgttacataggtatgcatgtgccatgttggtttgttgcacccatcaactcgtcatttacattaggtatttctcctaatgctatccctctcccagcccccgactcccccagcaggccctggtgtatgatgttccctgccctgtgtccaagtgttctcgttgttcaatttcccacctatgagtgagaacatgcagtgtttggttttctgtccttgtgatagttttctgagaatgatggtttccagcttcatccattctgcccttgtgatagttttctgagaatgatggtttccagctttatctatgtgcctgcaaaggacatgaactcatcgttttatatggctgcatagtattccatcgtgtatatgtgccacattttcttaatccagtctatcattgatggacatttgggttggttccaagtctttgctattgtgaatagtgctgcaataaatatacgtgtgcatgtgtctttatagtagtatgatttataatcctttgggtatatacccagtaatgggatcactgggtgaaatggcatttctagttctagatccttgaggaattgcccactgtcttccacagtggttgaactaatgtacactcccaccaacagtgtaaaagtgttcctctttctccacattctctccagcatctgttgtttcctgactttttaatgattgccattctaactggtgtgagatggtatctcattgtggttttgatttgcatttctctgatgactagtgatgatgagcatttattcatgtgtctgttggctgcataaatgtcttcttttgagaagtgtctgttcatatcctttgcccactttttgatgggattttttgatttttttcttgtaaatttgtttaagttctttgtagattctggatattagccctttgtcagatgggtagattgcaaaatttttctcccattttgtaggttgcctgttcactctgatggtagtttcttttgctgtgcagaagctctttagtttaattagatcccatttgtcaattttggcttttgttgccattgcttttggtgttttagtcatgaagtccttgcccatgcctatgtcctgaatggtattgcctaggttttcttctagggtttttatggttttaggtctaacatttaagtctttaatccatcttgaattaatttttgtataagatgtaaggaagggatccagtttcagctttctacatatggctagccagttttcccagcaccatttattaaatagggaatcctttccccatttcttgtttttgtcaggtttgtcaaagatcagatggttgtagatgggtggtgttatttctgaggcctctgttctgttccattgatctatatctctgttttggtaccagtaccatgctgttttggttaccgtagccttgtagtatagtttgaagtcaggtagcgtgatgcctccaactttgttctttttgcttaggattgtcttggcaatgcgggctcctttttggttccatatgaactttaaagtagttttttccaattctgtgaaggaagtcattggtagcttgatggggatggcattgaatctataaattaccttgggcagtatggccattttcacaatattgattcttcctatccatgagcatggaatgttcttccatttgtttgtgtcctcttttatttcattgagcagtggtttgtagttctccttgaagaggtccttcacattccttgtaagttggattcctgggtattttattctctttgaagcaattgtgaatgggagttcactcatgatttggctctctgtttgtctattattggtgtataggaatgcttgtgatttttgcacatcgattttgtatattttgtatcctgagactttgctgaagttgcttatcagcttaaggagattttgggctgacacgatggggttttctaaatatacaatcatgtcatctgtaagcagggacaatttgacttcctcttttcctaattgaataccctttatttctttctcttgcctgatagccctggccagaacttccaacacttacatagttatatttttatttagttagtaaataaactatgacaaaacacttgcaatttttttctgataaaatagtcatgttaaatggttatattccttcatcctctccaaatatgtacgctttcaaagaagagtagatactaattcgaatatatcctacccagtgtgaggattttaggcagagttaacaatgaattaaaaacttttaggcagtgtggggaaattttgctttctaaagggaaaaatttgctcccttaattgttctttacatactactgcttctctcatttcattttctgaaagatttaagtcttttggaccatcttaaagtgatcccaagccacatcttctacatgaaacagggttatatttcttcattcaacacatatatatatatattttttagcatcttcttcatgtgtaacattgcgttaggggcagaattccaaattgtagatcagccaccttctgggtagctaaaatgcacttggaagcagtggcttccagactgctgaatttcacgaatcagttttaaaaaatggcaattagtgtagagttgccacctttttatttttgtcaaatcaggtcatagcaaatgaacaccaaacaaagttttcactaggttggatttgttttgctccttccaaatgtctaatttaaaatttatactatgtacttttttctaattagaatattttacatatttttccctattccatttttatttgaagtggattattcttaaactcttcagctattatcctctactccacaaatgtcaaggatagacctttaatgagtagaacagatgtcagggatttgacagtagtgaataatcatgtctatctcttgtcaatcttttgattttaagtgagggaaatgctgtggagaattgtttcttttgttgaaaacctagattagtacatgctatgccatagtgaatgcttaatgaatacatgccaaataaataaaaaaaagaatcttcccaaattcttattcattgacatgaagatataaaatctagcatgttgataacattgaactttcttaaataattctataacaaattctcttctttttgtatggatttttcatacaatctgtgttaacatttgcttgtgaaatcaattagaccaactagaaaaatacagttaaatgtttaaattacttttgatcaaatggcttttgtttgataaatgctatcaaaaaggactaatcaagtttctaggtctgcggttcatttttttttttgactaatacttgtatttgtacagaaccttttctttggagtttattactcttgtctataacattttcaggatttaattaggagagggattttcctattcaggatatgtataggtcagattatgatgctgtggcatgtagaccataccttagaattgtgttgtatttggcaagaacttcatttacttttaacaatctggcattttctacattttatggatggaaataataaaaatgggatctttgccctaattggccagtggtaaaatttaaccttggttttcatggtcttagactttttcttaataagaaatttgtttaaaattagtacatttcttattaccattttcattttgaacctaatttcacaagtaagcatttttactgagcatccagtatgtccctttgctgacctagtgattctacaagtcctataccatttgtaagaatcaacaagactgatacaataaaatttattttaaatcttcaggatacagatacaagtgattatatttatgaagatttagagatttataaaatttaatcgagagattatttcatttttaaaacctattttttcttcttattaaagaaaatacatgttcattaaaggatattttaaaaacagataaaactaaaagaaaataaaaatcacctataatccagttacttggaaattagccacttttaacattcggtacagatttatcttatgctatattgtattatactgttatatgatttaaaagtgtgtgtgtatatacatatatatatatagagagagagagagaaatcatattgtacatttgggcttgttagctttctttttcacttaatagtagagagtgaattttttttttcatatttactattctgttacctcattcttaatgattacttagtctacagtgggtgataaatcctctctttttggatgtttatattatttctgataacaatttcattttaactgttgttagttctacaggaggttatgcatttgactttttacaagaaaggggtgatgagtagtatttgaaactaacgtgagtttgtagggccgtagtgtcctccggatgttgggagctattgctctggggcattgttcctcttagcccctccggacgcttgcctagctgggctgaggcaggctgaggcctgtttgttgttagcccagctgcaagagcagtggccttagtaacgtcagcaggaacagagcaggcttcatctctaccctttgtctggatttggtgctggtgtgttttccccgctgctgccatgtgatggctcgtaagcagcactacacactggatctgtaactccttttgaaagctctattgtgagatgctgctgcgtttcagtggaggggagatttttgctagtgtgccacttttggtttctttcaaatgtggatgtgccttcctctaaagaatcctaggtaaggaaagcactagttttgaagtgactaaaaatgaattaaattatcctttcctccatgcttcctatggtggaacggtagtaaaataggaaagtaagtactcagatttccttgcctactttgcattatagttaatcaccacgggagaggtgggaaatgagagagtgagagtgggaatcagggaagatttcctaaatgaaataatatttgaatgaggtgataaagaataataatgggtggcaggaaacacagaaatgtggataatggtagttactaagggtttgtttatgtactcatccataaaacattagttgagggcctatgctataccaggagttatactagactttggatacccaagaattaattagacatggttcctgctttttacgggttgacagtctggttgggaagatggaaaatagacaaaacatatatagtgggttctatagtaaaggtttctacaaataacatggaagtatcatagtccagactaggcaggttaagaaaagtcttttcctaggggttgacacctgagatgagacttgaaggacaaatgggcaagggagaaggtacaccagatagaagaaactgcatgtgcaaaggcaaggatgcaagaaggaagctggaatatccaggcactgcaaggagttcagtgtacagcaaaagagagactgcacagtgggggaggattggcaagaagtaatttacgagggcttaagacagtaagggacgtggagaaaatcaaggacaacccccagatttttacttggttggtagtgctattcgcactgtatgttttcattgcagaaaataaacaaggagggacagattcaaagaggacaatagcgtattcaaattaggacacgatgcgtttggggtacttgtgatatatcgatataacaagtagaaatctggggctcagaagagagattggggctgcagattcacgggtggtagccattagcagggggtggatgaaaccaccgagggggagaacatgcagagtgaaaagatggctggaaaaaaccccaagaaggagcggacaaccaaagatactgagaaggaggcaaggagttggaggaaaagcacagaagacaggcgaggagacagaggtcagcagtatcaagtttttctgaaagaagaaatcagataaattttcaccacttttaggaatgaggccattggtgatcttggtgagggcggcttccagggtgaagtaggaaactgacctgaatttcagcagggcagcagtcagggtggcgtgatttaagaattttcctttaagaagcttgtctgtggaggaaggagtgaggaatgatagcagatctaggactgtatgaaacaggatggagagagatgatggtttacttgtctttttccccaaggttaaaaagctggaacatttttatactaatgccgataaaatatgcatattattgatactttgaaatgtatgaggccgggcgcggtggctccgcctataatcctagcatttagggaggccgaggcgggcggatcacgaggtcaggagatcgagaccatcctggccaacacggtgaaacccagtctctactaaaaaaaaaatagaaaaaattagccgggcgtggtggcgggcgcctgtagtcccagctgctcgggaggctgaggcaggagaatggcgtgaacccgggaggtggagcttgcagtgagccgagagcgcgccactgcactccagcatgggcgacagagcgagactctgtctcaaaaaaaaaaaaaaaaaaagaaagaaatctatgaagttcagcacctaggaaagatgacagtcttgtagtcataccccacctgccggaattgagaaatccaaaaatttattgttttgtaattgtgacagaaaaaaaaatcatctatgatgtcttatacagcattttcgcactcttgatttttccatataatcccgaaagaagacagcacggagagacaagaggtgaatgaaataggccctgagcagctgaggtggtggagcaaagttcctctagattactcaccagtgaacaattcaggcccttgcacagagcccactcagctccacacaactctcaccagtcagcttgtctgacatctacacccattacagaggaggagcaaggaggagccgcgtgggtgagggcaggcacactgatgcccgggagaagtggtagtcaatatgctgataacgaaggagggacagacatgtcagaaaatgcctccaaaaggaataataatgccaataaaagctcacaacttgtgcagggttaccagacccctctgtaatagcaactgaaggcatcactatgttttaacatagtagcaataattggtatttcaaatgaatgctccatcaagaaatgtttaaatactcggtatactatgttttaagaacgtgaacaagaaaatgccaactgcattttatagtttgacattaaaataaaattttggcaattaaagtgctagctgggacctttcctaaagggtctcactctgttactatttgtagggcatccaaggcttagtgcttcttacataaattgatgagagatagagctgtgatgtgtagaaggtacagaaaacctggttatagatgaaaagaatgcccaggaagctatattagttcaagtttacatttccatagcacatttaaaaaaataataattttcaatctgtattgccctgtgaaatcataaaaaggttaataaatagaatttttcaagaattaataaccccattctattctgaaacctggaaaacacattaactttattagcttttaagtaacaaatattcctcttttaattctaaactatagtttgcccttttaatccatttaattgaaatagtaacctatagtagaaactattaaaaatcaattatgaaaggtccattaaatttctttaaccagttacaagaaataagtattttaattgttctttgagaactgccaatgaacaaaatcagacttttgtaaaatgaaagtaaaaatgctcatgattgaattgtggtagccctgttgatattcaggaaggataagccttgaaacctcctgagatccaaagtttctgatgtgagaaatgtttttgtcttttataatcaagagtctgaaatctagacaatggcttaaaatcaaagtagtgacctggaatgtttgttgttgactctacagaaatgtgttgaggagtgataatctttgccaaaaggagggagtattttttttaattgatcaaaggcttaaatctttttttttttaaactaacatttggttcagtcagtgttacctaccgtcttttatgttgaaattcagaagcaacatactttagtgattgacttatctgttggtgatgacatgttatgacatgttgttaggtgtttatcaaggattggaaattccaatttgccacgtaaaagaatggttactggttaaaaactacttgtattcttctgtgctatgagtgaaaaatttctatagcatctatgttaaaaaatgcttgttaaagggttgaactctcatgtctgtaatcccagcactttgggaggctcaggcgggaagatcgctttagtccatgagttcaagaccagcctgggcagcatagtgggacctcgtctctacagaaaataaacaaagtatccaggcatggtggtggactgccaaatagtcccagctatttgggaggatggggtgggaggattgcttgagcccaggaggtcaacgctgaggtaagctgagatcgtgccactatacttaagcctgggtgacagagcgagaccctgtctcaaaaaatatatataaataaataaataaaaataaagggtttaattaggggtgaaaatgaggtagaagcataaggaaaaattctaattgagagaaataagataaaagtgtcattcttaaaaaatgttgtatgtatatagtttgctgtcatagactagacagtggcaaatactgtaactttatcatagatctttcctttgtacttggataccattttgaattttatttttctgtatgtatttttttccatttaaatttatgctccaagatggaagttaacagtaataccaccttactttctttttccacgttacaatttttagagacatttcccaagggctatcttatttattaatatgtgattcaagtacactggggaaggtaagtatactattgttattttacaaaggaaagtacaggtaaaagagagttcagtaacttgtttaaggtcctgtagctagtgtcaagactaaactctttcttacttgtacttcattgtcttttaatcatagcacattattaatgtggaaattgataaagacatttttgttggaagtttaattgaactttgaacttgaaaatttaacttgtagacattttactcctgaaaaagggggcttaagtaacctaaactggaaagacattaagggctggaaattttacatagaccttgaacattttaaaattttgcttaaaaactgcttaaaatgttctattatagccaagataatcacagagctagaattcattctctactatacatgggcactacattcattgtaaccaactagtgttcagtagaagtataattgggaaagaaggaagacttaagttacttatatatgtaacaaggcagcttattaagaatttactaggctgggcgcagtggctcacagctgtaatctcagcactttgggaggctgtggtgggtggatctcttgagcccaggagtttaagaccatcctgggcaacatggtgaaaccccgtctcctcaaaaaatagaaaaaaaaaaaaagccagcgtggtgtcacgcacctgtagtcccagctactcgggaggctgaggtggatcacctgagcccaggagatagaggttgcagtgagctgagattgtgccactgcattccagcctgtgcggcagagtaagaccctgtctcaaaagaaaaaataaaaattaccataacttgatgggaaaatgcaactttattgtttgttctacagcattaagagaagcatacaatccatccttggggatgggagactgtccactgcattcctaaataataaatcctccttattcccaaggaaggtaaataggctcttggatggtcctagaattcatggcccaggcttttaggatcatcctgcacctaaagcccttgggagaacaaccaaaccctaatgctgttgaaagatattaggaaagacatgagggttttctttagaagactggccagtttctctcaggaaagaaggacatttcccagagacaggaagtcaaagatggcctgttttttttgcgggtagttgaagctggtgctttactgaagcagtgtcttggaggtccttatggtaggtatggctatgtgggtgttggggatgactgagcactgagaccatgactttgatatccatggtgaaggtccttatagataacttggtacggaggctgagggagggtggcatggagggtaagcagtgaatgctgccagtggaaagaagttaccttcaacagaaccacggggtttagacaatgaatttctccagggggattgcgctggacaagtgactacaggccttgcctaattttccttcattgcatcatctttgaggtccttacaccactcaaggggtgagagaagagctcttaggcatatctgatatttagatttcttactgatgtggctgactcttagctttgaagtctgaactgatttgaatttgaaaaatgaaaagatgtgacattttttgtttcttgagtcttgtggagcagttcatagctttatgtgcgtacattcattcatatacacatgcatatgttactgtatactgcatacttctctttaatacccctgtggtctttacatatccatcctgaaatgtcgtcatcctcatctgacaacctagaaaatgctaactcatcattcaaaattcatgtcaaatatcagtcttcctttctgagtatgcagggagtaaggagtctaaaaataattcttggcttcttaatttgtgatatagagatattgcctgccttgcttaaatcacagctggttatgagaattgaatgaaatgacttaccttaaagagacagaaagtagctaagggtgggagagtccaagtagcaaaagcatggtgtggagaaatttgatatgcatggggagagggcctgagggagacctgtctcaaggtagctgaggatttttctttttcggtatatgtggtggggaggaaaatagctaaaaaatatttacttcatgtaagactagatttaggggagaatattaaaactcaggaagaggacttttaacataatgaggtggttaaaaggagacaacttctcaatagacaagggaggtattttgaatagatttttggaaatggtacacaaaattagttttattgaagagtgaaagagctggacagatgggaaaatcatcatggagactagtagattgtgagggtgaaaaccatgagtaggcttaaaagtattgtctcaagacaaaaaaaaaatgggctattttggaagtaaagagtttttaattccaggaggtggccctctactgatgtaagcagactgtgatttagtatgtgaaggatggatgtaccagactcatttcccagagggaagaggcagttactagattgtttagcctcttcacatgcttgtaatattgttgctttcaaaggtttgctgaagaaatgaatgaaatggcttgtcaagtattagtaagatatttctagctgtagttcaattgcattttttttttttttttttgagatagggtctccttctgtcacccaggctggagtgcagtggtgtgaacatggctcattgcggcctcgacttcctgggctcaagcgattctcccatctcagcctcccgtatagttgggaccaaaggcacgtgccaccacacctggctaagttttaaattttttgtatagatggagtcttaccatctttcccaggctagtcttgaactcctggacccaagggatcctcctgtctcagcctctcaaactcctgagattataggtgtgagccaccacgccctaccaacaaaacttttttttttttgcccgacccccagcaacaaaacttttgattccttccttataatagtttctttttaaataacttggacaagaaatgtttgcacagaatctcactgataatgtactttaacttgaagagtatgaaataatcttgagtctactatttttgttttttaatgaaaatgcattaatcatttacattttttaagatacccaatttattttggaagctatatgttattttcataaaaaattcttaacttacagaatgtccactgcttaggatttcctgttttttttgtattttaaatatatctctaacaaataatcatcacgaaggaaaagaggttacatttattgcagtcctgctatgtgctttatgcatgttatatagtcctttcaaaaacttttcaagtaagtgatactatttttattttatagatgtggatcatgagatttagagagacgatgtaaaatatagccaagataatacagtctcagtcagaggtggagctgagatttgaacccaagtctttttggaaacaaaatttgattctcaccacatttcattccagggaaaaaataattccatcctggctctgtttttatttatagccagaaatggaccacctctaactgtctccactgctgccattctggtctaggcttccctgatgttttgcctctattactgtaacatctcctaattgttttccctgcttctctctttgatccccacagttgatttttaatggctaatgcaatcctttaaaaacgtaagtcaggccgggcgcagtggctcatgcttgtaatcccagcactctgggaggctgaggcgggcagatcacctgaggttgggagttcaagatcagcctgaccaacatggagaaaccccgtctctactaaaaatacaaaattagccgggcaaggtggtgcatgcctgtaatcccagctactggggaggctgaggcaggagaatcacttgaacctgggaggcggaggttgcggtgagccaagattgcgccattgcaccccagcctgggcagcaagagtgagactccgtcacagaaaaaaaaaaaaaagaagtaagtcaggtcatgttactcctctgctcaaaattcttccatcactccccatttcacatggagaaaatacagagttcctacaatggctgaggtgatctggcgcccctttctttctctctgacctaatatctgacttcttccccttgctcattcctctctagcatgccaggcacatgtctgcatggctaattcacttaccccttcaagtcgttactaaactctcactttcacaatgaggcttactttgatccactatttaaaactgtaactccagtgggacttaagatgcaaaaatttgtgattttcaggattttgattatatgctttaaatatataaaattctctgctatgttcaatgataactactttttcatgttgacatacagaattggaatatatctaaaacaccaaaaacatatacttataagtagaatagtaaagatacacataatgttttctaatcgttgactgtatctcattgtaagaaatacattttattgtgacctcgtgtatctatataaaatggaaataaaagttttataaaatacttagcatttctgtgtgttacactcatatagtttctgttgaattccattcctttcttttccattatgaaaatatgttggtcaagttctacaaaatttatttcacaactcatttattggttacaacctatagcttaaaaatattgggctattcttcaaatcccattaatgcaggagataagatatgaattttttgcattaacttcttgaaaacatacactgcagagggtgatgattgaaaagtcacttatacttttgagttattggcatgtagctattactgcattttgcatattcatgctcagattaacaaaagtaatatagattaggttgcataaatatgtaattaaataattataagtgcttatattttgtcaatattatttgctaatggtagaactcttatattagaagtggttttttccatccagtggatcaggagatttctatcttttttcccccctaatttccaaatttcagtattttaatttttgatggattggtgcttattttcctatctttattgatattagatactgacagtgaagaataatattcaataataaaaatttgtgcttcattttaaagtattttaaatgaataataataataattaacatataaccctacatagcttattgtacatttgtttattagtatcttaatttcttcgcactgaaaacattaacagatacctctataatattctctaatatggtgtattctctaaatttgaaatttcctaatgtaatctttcttaaaagtaggagatatatattccaagcttatcttttaccattgtcctcttacatgtaatgctatagccatattaaatgtggcctgtccctccctccttccctacttcccttccttccatctttccttcctcctgcctttctgcctccttccttttcttcctccctcccttttttccttccttttaactaatatttttgaacacctgctatgtgccatgtgtagtagtgggaagaaaataaatgacatagtctttgctgtctctgaacttaaactggatactaacagtcccagttatgaaagtgaaaacagaaagctttaagattatttagaaagtcagaggtggtggctgggcattgtggctcacgcctgtaatgtcagcactttgggaggccgagctgggtggatcacttgaggtcaggagttcaaggccagcctggccaacatagcgtctctactaaaaatacaaaaattagccaggtgtggtgctgcatgcctgtaatcccagctacttgggaggctgaggtgggagaattgcttgagtctgggaggcagaggtttcagtgagccgcgccgagattgtgccactgcactccagcctgggcaacagagtgagactctgtcttaaaaaaaaaaaaaaaaaagtcagaggtggaatcagattctgtgaagaattagaagaggcatcagaagacactctttagtcttcgtattttaaagatgtagaaactgagtctcttatagattaaatgatgtggtgaggttacagctgaaacccaagctggtttcttgactagtgctctttccataccacctcttctctcttgactatcacattgcctgcccagatcccatgttgtcatatatttttgtatgtagtttgtgctgtcaaagacctcttttcaaaatgcacacactcaaccatagactgttaccgttattggttttgttacttgaaattataattggaacaattagagatgcgtcagtggaaaggcaatgaaagaaggccattaagtgctaataaatgcctctcctcatgggaacggagatcttttcttctctatgtatttgagctcttttcactggtgcttttaagtggctagaaataacacttgccacacgcttgtggaatactctggatgccagggggttcattttattctgtatttgaattgagcacactgcggttggaatgtgtgttgattcttttgttgatttaagcattcattccatgttttgcattaaccttttctcatggaagacagaatagtgagagctcttagagaatgaagtctttaggtagctgatgactttccaagaaacagatgaaaaggttaaagttgtaagtgtttatgttgatatattttccttttcataacaccctaaaatctagatacaatagtcttcccttatctgaagttttgcactctgctgtttcagttacccatggtcaattgcggtctgaaaagactcaatggaaaattccagaaatacacaatttatgttttaaattgcatgtcattctgagtagttagttaaatctcttaccattctgctttgtcccacatggaatgtaaattatctctttgtctagcatatccacatggtatacactatctgcctgttagtattatagagtcaggtactatctgtggtttcaggcatccactgggggtcttgggacatatcccctgcaggtaagggggagctactgaacagtgtgacaaattggatgtagccctccctaaagctacatgcttacctgtggctagcaagagataatcactacttgttgatatggtgatatattagcttcagaaacgaatttaggtaaataatgaatgaattccagaataacttaccaatactaaaaatgatgacaatgatagtaatgatgatgataaggataatagcagctaatatatttgactacttactatgagcctgtaagtctgtgccttatagaaatgagcaaggttgtcctgtcctaagagaggctacataggagaggatttgacttgggctcctggtacttttggaaaaaacaggaggggcatctaaatatgccggcatatcaggaaatgcttcccacaggaggctgcatcaacatgtctttaagagtgagttcattcctcaataaagaaagaggcattagacaaaggcttctgtggttaaggagtcaacactgaagtgtgaaattagtgtagaatcccttgggagccagctgttctgggaataaaaagtttgcgtgggggaatcatggatgtggcttctagagagtgagagagaagctggatccaggaatccacttaaatccttcctggttaattggaaaatcagattccattctttttaaataaacaggatgtgaccatggtagtgctccattctgttttagtggagaaagcaacctacacttttttggcttccaattaaatacctcactttaccccaacatcttttttttttttttttttttttttgataaagagtttcactcttgtcacccaggctggagtgcagtggtgcaatctcggctcactgcaacctccacctcccgggttcaagtgattctcctgcctcagcctcctgaatagctgggatattacaagtgcgtgacaccacgcccggctaatttttgtatttttagtatagacggggtttcgccattttggccaagctggtctcgaactcccaacctcaggtgatccgcccgcctcggcctcccgaagtgctgggattacaggtgtgagccactgtgcctggcctctagcatcttaaaatagtgaaaacaaaagagtacactattggctggagaagctcacttctaccctatccacgctcttcttttccagcctcctgccaaggagctggtaatgtatattcaggaccaaggacagtaattgggccccatttcttcatctgaagccttagcaggggaggggttgacgtgagctgtctagaccagaactgccctggtcagcgggtaagtgttctcttgctgttgcttcttctcactggctggtttgtcttccacaggtggaagacaaacttttctagtcactgtcgtgtcaaagaaaagtctgagattcatgtatgggcttcgtggagaggggcaagggaggcctttgagcctctttggtaccaggccttagggctacctcttacctaggccaaatgaggatttcatgtggtccagcccatgtttccaggattggaaagggaatacattgaagtttgcagcaaaacccagctcagtttgtcctttccacatgcatttcttttagaaactctgcaggaaggggtggctaacagaactgaatgtttagcatcctgagttttattttttgttgatgtataatacatattctcagttggggtgatattgcccccaacagggcaaaaactggttcttgggggacaaaaagagtcttactctttttatgtttaaagcgcaggtgtatgtagagcacatatactggtatatagtatatctatgatattaaacttaataggggaacatttaatggggaaaaatatcaaataagtttcattaggggaaccataatgaaaagaagggtgagaaacactggcttaaatcattgtctgtctgtctgtctctctctttttctttgtctccttcctaggtagtacaaggctggttccagtgacctataatgtcatcactatcctactctttgttcttttctgatcttccatctgcacaattaccttgtagtattaaggtggttgttgcagctccactatcatatatagctgacagggagacaaaagaagaggaagggtaaaagttacacattaacgaaatcagaaccttttaaaggaactcttctgatgtcactcaaaacctctaattacatcttactgggtagaagttagtcatgtggacaccccatttgcaagggaggctgggaaatgcagattgatttgtctattaaagttgggcacattgccattcccagcaaaattgggattctgttaataagaaagggaaaatagatattaggtaggcaaccagtgatctttttactagtgctttttgccattcgttttcctggcagccaacttgggtaaaatataatctgtgatttggaaaaagtgaaagctaagtgcctttattttatgccaggactcattcatctggtgctttaaattcttgaacagactgacttagtgcataagcaaataaaatggattaaatattaaggcattaagttcttcagcatgtttcctggtggggagaacacttagtatttgtaaagtgagaactgacttctttgttcagtttatagatccctgactcagaaacttttgcattctaaatgtttcagtgggaaccattaattattgattatttagatttcatgaaaatatgttgtttagaaattttgaattttgtgaataaaagcaaaatattgggattcttaaagatgtcaacaaaaaataagtaaaagcattgtatttcctgcaattgaatttgtagatatgtttttcagataaaattatgatggtattgagtacttcatattatagagtagctgacagcatcaaaatatgattctttgtaaatctgtaagtactaatattcttaatatatgccaataatttagagaaaaaaagtaaacttcagtagaaaatttccaattaaatctgtagattttggtaaaattacttcctctagcgattaaaattgcattgtaatggttggcaaagttcccggatttgggcatgaaagtacagagctattttaatagcaccattgtgttcagggtgtggaactggattcttgacctcagtgcttcttggagcagggggtgggcagtatttgtgtgatttgtctgtctttctcttcctatctcctttcttttgcctgtttccctttccttgtttctttttttgttggatcagtatattgaaatattgtgagatagtactcctataggaattattttggtgcacagattttttttttagacagagtttcactctgtcacccaggctgaagtgcagtggcatgaacatggctcactgcagcctcgacctcctgggttcaagcaatcctcctgcctcaggctcccgagtagctgggactacaggctcaagccaccatgcccagctaatttttacattttttgtagagaagggagtcttgtcatgttgctcaggctggtctggaactcctaggctcaagtgatcctcctgccttggcctcccaaagtattaaaattacagatgtaagccactgtgcatggccagaaaattgtattaaatactttgaaaattaagttttaaaagagatttctctgttttttggtttttgtttttgttttgttttttttgagatggagttttgctcttgtcgcccaggctggagtgcaatgatgcgatcgcggctcaccgcaacctccgcctcctgggttcaagggattctcctatctcagcctcccgagtagctgggattacaggcatgcaccaccacgcctggctaattttgtatttttggtagagatggggtttctccatgttgatcaggcttgtcttgaactcccaacctcaggtgatctgccggcctcggcctcccaaagtgctgggattacaggcgtgagccaccacagctggctgagatttctctgtttttaaggaaaaaaattttaaaaatatattggttctggatttttttttaaattttattttcttccaattctattccatgtcattagacagagtcaataatattggcccacctagtattccgtattttgtaatttggtgaatatatttgggtcttaaatgttcataatatcaatttaaatgaccccagcaaattactggtgagttgagagtcatcttgcctattcttttggtccatataatgccttgtagctgtctgccagttgtgaattagatgtaggattgttttctctctatgttatgactatatggaacaatgacgaatcttcttgaaagggtatgtagaaagtgtaaaaaatatttagtgcctaggcactgaaggaggctctgagggaacacacaagggtgagggagcagacaagtgtgtgttgagagcttaggtagagacatgtgggggtggggggacctcgagaagactcccagagaagatgacatgcagctgagtgttgaagatttagggggatagggatgtgcctagacacgaagtctaagagcacagatgcgcacagagacttacactagaggacaaggctttatttctgctttgtttactgttatatctccagtgtctaaggcttcatttagcttgtagtagacacataatgcacatttgttgaattaataggttaaattaattgtaagaagttctatgcctctgatgtagggtttcacttggagaatgttcagaaataaaatattttgtaagtgatactaagatttggatttcatgctaaagatcctggggagtcattcagtgatttaaagtctggtaatgatgtgatagaacttacatcactgttaaagttggataggagggtgctcaaattagatgcagggaaattagttgtgagattagtgtagcagtttatatgatagttggtggaagctggagtggtgatccaaatagacaagagagggtgaatttaagagatattaagatagaatcaacaggacatggtgaccaacttggagcatgaggatagaggtagaaggaggatggatgattcccaggtgctaggcttggcggacatttatggatgctgatgatgtggattatgattgggaatgaaggaggagaaacatttggatagattgtaatgaactgtagagatgtttggttccagacacctagtggagatgtttaagaggttaatatgattgtaatgagttgtagggatgtttaagaggttaatgtgattgtaatgagttgtagagatgtttggttccagacacctagtggagatgttaagagttgtagagatgtttaagaggttaatgtgattttgagttctagtgtttggctacctctctggtagctcgtttctattctctcagttccacttctttcaggtacccattaaatgttggtatttctgagagtccatattaatcacttgtttccactccattcctactcatctgttcctttggcttcaacttcctgctctgttgctcactgtcaaattattgtctccagacaagacttttgtcctgagtgccaactgttcagtctaactgcctacatgttgtttcaatcagatattccccaggcatgtaaagataaatgtgtacaaataaggaccactcattttcttcccccatttcttttacaatgtagagaaaaatggtcaagagcacagatgctagagttagactccctagatttgagtcccatatgtcacttactagctttgtgaccctgtgcaaattatctgacttttttgtgcctctgttttctcatctgtaaagtaagaataacaatagtaccttcctcataggatgttatgagatcaaacaagttaatgcatataaagcaatcagattggtgctggcacatggtaagcactatattaatcagatcttcctttatttcctgtcctggttagtgataccattgttcaaccagctacccaaaccagaaatgtgacatttatcctaactcttccatatcactacatcagaaggagattcatcagaaggaggggcatcagaaggagattccacatcaaagcaatcattaaatcctgccatttgtcttctttccatctctaccattactgccttggacttgacatttattgtcttctttctgaatgacatacaccggctactgactagtgactcatcaccctgtctttgatctttctcttcttcaacgttttctatataatccccagtgattattctgaaatgcaaatctgatcacttaaaactctatagcgccttcctgttcccacagaaaatagacaaacacaaactaccagtaaagacctctgaggtctgttctggcttccttctgtagactcttctctgtctcattctgatctctctttaatgtttacagttctgtgatgttttgtgctactctggtcttccatgtcttcgtatatctgattttctgtggaatgcctcctacctcatatttcttctcagatattgtttctggcagctcctccaagcaggatagatattctttgctgtatgttgatactctaccttgggtggagcttaagcatagtacctgttatgcttattatagttatttatttgcatgttgtcctcctccaaggctgagcttgtttatttttgaataaattggctccatgaatcaacttctaggaaactatgagttatgcctcccatcttcagttaagggcagatgttaaacatttatttactgtacagattatctggttaacaatcatttacatctatattgaagaaaccatctctgtagttactttatttgctgccggggggaattttttttagttttcttgatacagctagtgtgttctttttcaggcttccaaagatcattcttttcctagtggagcaataactatatttcctggtaactcagttactggaagagccaataagaaatgtcatcaaggtggttcttaaactatagtgtgggaattgtactctatttttttgtctaggagtcaggaagccatgaaagagcattaacttactgcctgaagaccagctgttaacactgaagattaacgctttattgagatgggttgagagagaagaaaggcatttgatttgtagctgtcatgtggcatccagagggaagcactctctctgactgaaaatctgtacagttcaaccacaaataaggcatttgggcaatataacagaatcaatttaataacactgagtcttcaggttactttttgaaggtacattttgcaggaaaaatggcatacatattttctttttatatagatatattagaaaataaatttaaaaatatgtagtctaaatccaaagtaatgctaaaggaatagtcattatttttccagcatttatttaaaaaatgttttcccataaaacatgcttacaggttttcccataaaatatgcttacgggagaaaacctattgcacagaaaatgatacaattcaattggatggtggtgctcagtggctaatgaactattcaatattgttcgtgtcagtgctttggctccctgttgctgaaggcaggcataagtgctttccaaacccttgcaggtgatcaacaccaagaggatagttcaaatggggtctgtggctcctatctccaaattccattagcaaaatgttaaaatattgtatgtaggcacttagttttttaaggtaagcgaatactacaatatcagggaaaacacactgtggctgtgttatatcaaaaataatagtaacatttttccgtggtgcttgggttttaaaacggttggcgtttgttgcatttcttttgatccatacaacttgggccatagttagcattatctcagtttagaagtaaaagaaataggttcggagagaattttgcccattcagtggtagagctaatattcaaaggaaggttctgtgtttctcattcgaggactcatctcctgagctcacacagcaagagtgtgctgggcatatggttttcattttgctggaccatcagaaggagacatatctttaggatgttcagattaggtgctcattcttcagaagagagaaacttttctttagcactttgttgtacttcagagatgcctgtgaaacaggatagacttcgaaatagtaaaatttgattatcaaaatttttggcttttggtgagaatatatctgtcagtggtaggactggtgagagccatgaagggaactagtaactgtgagttaataagaagggggttggatactggaatctatttattactcttaatgcaaagttctgtttgcttaataaaaaaaatgtagagaaaaatgttagatgtatctgtgtatttttagtcaacacataattatttgctatttataatgtttgatacattctattttgctttaacaacattcacagggattgttactaaatctacatataaatatatggtcacaagcatgaattgaaacaggtctcagcatgaagatataaagtgactaaacctttttttcttctttcttctctctgtcctttcttctctgccttttttcttgaagaaaatattttattgacttgttaaatggcattattcaggccattcatcatttttccttggcattttatacatcctaaaatttcactcatggtcctcacggctcaaacagatgccctccagctctttttatttttatatcctgacttaaattttttttattattatactttaaagttctgggatacatatgcagaacatgcaggtttgttacataggtatacacatgccatggtggtttgctgcacccatcaacccgtcatctacattaggtatttctcctaatgctgtccctctcctggccccccaccctctgacaggccctggtgtgtgatgttcccctccctgtgttcatgtgttctcattgttcaactcccacttatgagtgagaacatgcggtgtttggttttctgttcttgtgttagtttcctgagaatgatggtttccagctttatccatgtccctgcaaaggacataaactcatccttttttatggctgaacagtattccatggtgccctccagctctttactctggagttttgcttttttccctccctgcattcattttgattctcaaattaacctgttcctttttggttaaaaataaaacaaacaaaacaaagtagatgctttgtttattttgattaaattttaaatgattgttgaagccatctaaactagcagttattctaatatagcgcatgaagaatattaaaagtgtatttagttatatgtatttaaatatattcaaaacatcattataaagagagtattgttctttctcttttctgaactccaatgtagtttatcttcccttctttaatggttttcatgactatgttttgttcccattaggttccgaactcctggtgtctacccagcatgagtccatgcccacagcatctccctagcacttcttaatttctcagtgaattttttttgatgaataaataatggtatttcagtcgcattttcaaaagcacatacaaatttgtaatttcactattttctattgtagtcatatacgttgacattctaaatgaactttggtccttgaagtcaatgagaaaagtcattaacttaaggttgttcagtactatttcctctgtcagaacacacagtagcacttgccaaataaattagttgtagtaggagaaatttggcttgattttatctttttgactctccattccaaactatcagtgcagctaaacacttgggttttggagcattctcactgtcctttgcctattttataagctgctgttcattgaaatcccatctgtgttgaagctctgttctgccaaatttcctacaaaactcatagcacgccacatgccattattgcccactgaattgttgagtaacatatcctgacttgaggccagtggttttcaaaccttggtgagcatcagaaacatctgggagcttgttaagagtacaaatgctgcatgccttcccctgaatatgatgaatctgtagcttcaggatgagtcctgggtgtctgtggttataatactttctgatgggcctggaaccacattttgagaaaaactgccactgagtgaaaagtttattttgaatggaattctgtgatgattcctctaaaagttgtgagacattctaaatgtgtttaaaaactgtgctataggtatgtttttgaattcttcgacattgcagaatcagcaataatttatgtggcattgcagatgtaatattatgtagtactatctttgctgcagttttattagcttagtgtttattaatatgtcatttaaaatatgatctttatcaaaacgtccatttatcaggaataagaacaaatggaatgagaacaaacaaaactcaatttgcaatgtttgttttctgctgttaatttctatagacaaaatacttatttctacttgatcccacattttatgtgtccttttttttagacaagagtctcactctgttgcacaggctggagtgcagtggtgcgacattggctcactgcaactctgcctcccaggctcaagcgatcctcccacctcagccttctgggtagctgggactagaggcccacgccaccacgtctggctggctagtttttgtagggtttttttttttctttttttttttgtagcgctgggtttttgctatgttgtccaggctggtcttgaactcctggactcaagcaattcaccagcctcagcctcccatagtgctgggattacaggtgtggaacactgtgcccggccttgtttccttttattggagaaaagtgtcagtatatttagaggatacaatctaatgtgcctttagtagtggtatatgatggtgctaatattgatcttgaggccaaagagcgtactgggttttttaattatcaaaaagagtttaagaattaatttcagtatcacatattttctttaatgctgattctctgaaaatcaaaattcattgataatacacagaaactaagggcaaacttttatcagtttcagctagatgaatgaatgacatattccagtgaagtcattatgataatgtacatggatttctgtgcaatataaggccctcctcctccttttttttaaatttgaaaatgcttcttttattaagatgggcctatcattgtttggataagcgatacattgaaaggttgggaattaggagaattgctgtggaacttggtttatgaatgtacaggtgataagaattccttcatgccttaatctgtatttcttactttttttagggactttctccctcgagggtcgggcattgtaacaagacgacctcttgtgctgcagcttgttacttctaaagcaggtaatgaatgaagatgtttaccgcatggatgggcacatcctgtggccccttttgccttcataggtgtgggattgtacaaatagaaacgtttttgtgatcgccccactgtgggcagctgcccacatttctctccagaatgctgccttcttcattgctcttttcattcctttgattacattaaaggggatattttcatagatttttttaaaatacctacttaaaaaaatgttttattgctcattgtaatccatctatataattttacagtacagcacaaccactaatactcctttggtatgctttgtgtgtgtgtgtgtgtgtgtgtgtgtgtgtgcgtatgtgtgcatgcacatgcacttggggattaactcataaaattcaacaaccatataatatctgtatggatgtgtatgtgcgtatctatatttacactgtgctatgcttccttctctctcttacatcatgataatttgataggtaaatgatgctttgtttttattttcattttatttcagcaactgatgatgttgaatttttttttcatgtttatttgccatttgtatttcttctctcgtgaattggccatttttctttttccccatttctttttggggattttactagttttcctatcaatttctttgaatgcttaagactgaagcacctcataaaaatcatctatcataaattgcaaatatttttaatagcttgttaaagatacagtttacataccatacaacttgaccaatagaagttaacagttgaatagattttagtcttttcacagatatgtgcaaccatctccacaatcagctttagaactgtttgatcactcccaaaagaaagcctgtatgtttctgctgtcacctcttttcataacacctttccccaccactccagcctaggcactactaacctatgttctgtctctatggatttccctattctggacatgtcatatgaatagaatcatttaatatgtggtcttttgtaataggcttttcttgcttggcataatcttttcaaggttcatccatgtcgtagcatgtattagaacttcatttctttttatggcctaataatattccattgtctggatagatcacattttgtttgtccattcgttaactgaggagcatttgagttgtttccaccctttggttattatgaatgatgttgctataaacattcatgtacatgtttctgtgtggacatgtgttttcatttctcttagaaatatacctgagtataattgctgggccatgtagtaactctctgtttaattgtttaaggaactgacagactgttttcaaagcagctgccccattttacattcctaccggcagtgtatgagggttacagtttttctatatccttgctaacccttgtgggtaagaagtgatatctcactgtggttttgacttgcgttttcctaatgactaaagatactgagcatcttttcatgtgcttaatgatcatttgtatatattatttagataaatgtgtattcatttcctttgcctagttttaaatttggttatttgcctttgtattactgaattgtaacagatatatattaaatacaagtcccatatcagatatttgatttgcattttttttttctattttataggcccttttcattttcttggcagtgtcctttgaagcacaagattttttattttggtgaagtccaatttatctacttttttctttcatttctcgttatttttgtatatatctaagaatcctttgccaaaaccaaggttataaaactttattctatgttttcttctaggagatttatagctttgatcttccacttaggtctttgatccattttttaaaattactaatttttaaattttaaatttcattttagatttggggataggtacaggtttgttatattgcataatgtgtaatgctgaggtttgggtttctagtgaaactatcacccaaatagtaaacgcagtccccaataggtagaatttcaaccttcacccctcttccactcttcccccttttggagttctttgcatctgtttttcccatctttatgtccatgtttacccactgtttagttcacacttgtaagtgtgaatgtgtggtattttatttcctatttctgttatttctcttagaataatggcctccagctcagtccatgttgctgtgaaggacatgatttcattcttttttatggctgcatagtattctatggtgtatgtgtcccctgttttctttatccagtcaactgttggtgggcttaggttgattccatgattttgctgttgtgaatagtgctgcagtaaacatacaagtataggtatctttttgaaataataatttcttttcctttgggtagctacccagtagtgggattgctgggtcaaatggtagttctatttttagtcctttgagaattctctatactgttttccataggggttaaactaatttacattcccaccaatagtttataagtgttcccttttctctgcagccctgccatcatgggttatttttgactttttaacaatagctgtatcagtctattttcacactgctatgaagaactgcccaagactgggtattttataaaagaaagaggtttcattgactcacagttcagcatggctggggaggtctcaggaaacttacaatcatggtggaaggcaaaggggaagcaaggcaccttcttcacaaggtggcaggaaggagaagagccaagcaaaggggaggagccccttaaaactatcagatctcatgagaactcactatcatgagaacagcatgggggaaactgccccccattaattacctccacctggtctctcccttgacatgtggggattgtgaagattatggggattacaattcaagatgagatttgggtggggacacaaagcctaaacatatcaatagccattctgactggtatgagatgatatcttattgtagttttgatccgtatttctctgatgattaatgatgttgagcattgttttcttatgtttgttggctgcttttatgtattcttttgagaattgtctgttcctgtcctttgcccacttttttttttccccctttttgagatggagtctcgctcttcttgcctaggctggagtgcagtggcgggatctcggctcgctgcaacctctgcctcctgggttcaagtgattctcttgcctcagcctcctgagtagctgggattacaggtgcccaccaccacgcccggctaattttttgtatttttagtagagacggggtttcaccatgttggccaggctggtcttgaactcctgacctcaggtgattcacccacctcggtctcccaaagtgttgggattacaggcatgagccaccatgcccggccctttgcccactttttttaaattctttttattttatttttatttttgagacagagtcttgctctgtcacccaggctggagtgcagtggtgcgatctcagctcactgcaagctccgcctcttgggttcatgccattctcctgcctcagcctcccgagtagctgggattgcaggtacccaccaccacacctggctaatttttttttgtatttttagtagagatggggtttcatcatgttagccaggatggtctcaatctcctgacctcgtgatctgcctgccttggcctcccaaagtgctgggattacaggtgtgagccaccgtgcctggcctttgcccactttttaatggggttatttgtttttttcttgttgatttgtttaaagttcttatagattctggatattagtcctttattggatgcatagtttgcaaaaattttctctcatcctgtagatcgtctgtttactctgttggtagtttcttttgcagtgcataatgtctttagtttagttaagtcccgtttgtctatttctgtttttgttgcattgcttttggggtcttagtgagaagtccttttcctaggctgatgtctggagaagtttttcctaggttttcttctagaatttttatagtttgaggacttacatttaagtctttaatccatcatgagttaatttttgtatatggtgagagataggggtccagttatattcttctgcatatggttaggcagttttcccaacaccatttattgagtaggatgttctttcctcattgtttttgttgactttgtggaagacgtgttggttgaaaatatgtggctttacttctgagttctctgttcttttacattgatctatgtgtctattttcatacaagtaccatgctgttttggttactatagccttgtatagtttagtatagagtagtttgaagttgggtaatgtgatgcctctggctttgttctttttgcttaggattgctttggctatttgggctctcttctggttccctattaattttagtattgttttttctaattctgtgaaagatgatgttggtaatttgataggaattgcatagaatctgtagattgctttgggcagtatagtcattttaaccatattgattcttccaatccatgagcatgggatgtttttccatttgtttgtgctttgatccattttgagttaataattttatgcactaagtgtcaaactttattttctgcatgtggatatccactagtcccagcacaatttgttgaaaagactattctttcctcactgtaggatcttggcccctttgtcaaaaatctgttgaccagagaaatacaggtttattttgggactctcagttcttttcgactgatatttatgtctatccttgggccaatagcatactctcttaattacccttgctttgtggtaagtttcaaattgagaattgcaagtccttctactttattttttttcaggattgttttggctatcctgggtctcttgaagttcaatatgaatttcagaatgagcttgttttatcccgggaatgtaagattggtttaacatctgaaaatcatatcagtggaatgaaaaaaaatcacagaattacctcaatagattcagaaaaagtatttgacaaaatctaacatgcattcatgataaaactcttagtaaataaaggggaaggaacttcctcaacctggtaaagggcttatatgaaaaccacatagctaccatcatacttaatggtgacagactggatgctttctgtctaaaatcagtaataatacaaggatgtctgctcttgtcactcttattcaacattgtacggtaggttctaaccaggacagctggggaaagaaagaaataaaaggcatctaccctggaaaggaagatgtaaaattatctctatttgaagatgatgtgatcacatgtatagaaaaacttaaagagtccactaaaaaactgttagaactactaaactatgttagcaagatttcaggatacactatcaatacacaacaatcagttgtattttttaaacttttattttaggtttgggggtgcatgtgaaggtttgtcgcataaataaacccatgtcatgggggtttgtggtacagattatttcatcatccaggttttaagtccagtaagcccagtgctcaagttatcttttctgctcctctccctcttcccactctccaccctcaagtagaccccagtgtctactttttccttctttgtgttcaaaaattatcatcatttagctcccacttataagtgagaaaatgcaatatttggttttctgttcctgcgttagtttgccaagggcaatatagcctccataaagacacacatatgtgaatgttcattgtagcactattcacaatagcagacatgaaatctacctaaatgcccacgaatgacagattagatttaaaaaaatatagtacatatacaccatggaatactatatggccttaaaaaagaacaagataatgtcttttgcaggaatatggagggagctggctatattgtccgttattgtaattcttagtttccttggattgggttttgccatcctcctgaatctcaatgatctttgtttgtgtccatattctgaattctatttctgtcatttcaaccagcctagcctggttaagaactcatgttggagaactggtgtgattgtttagaggacatataatactctggccatttgagttactggagttcttgctttggttctttctcatctctgcatgtgggtgttcctttaactacagtgtagattgaatacagttgatagacttcttttctggatgttttcagcaagccaaggctttgtgcagggttgttctttgaagctgacttcttatctctggcttcagggtggggtatgttagtgaggtatttttggtgttgaagctttggggtgtgatccagtaggtggcacttaggctaattaatcaattggtagacttttcctcagttatgtggctcccctatttttcctcacagttgcagctctgttccctctcaacactctgaaagggtgggttcttctccctcttgagtgctggctatagactgtggcttggcattcctgggcttctcactgccactctggtgtgatctcagtacttgtgttccctcctccacttggaggcagtggaggaagggaccttagtagtgattgtggccaagggtcttttgcttggttcctgggggctccaccccagagagatgcaggtcagcaattgcttagtgcaatcagcccagggtggagggtctgtgctatgggaccaagccaggggttccctgtctggtgatgagcactggagggtgtgtgggacccatgtgagacagtctggccttcctccttaggtcaactgcagcttgctggaggtgtgaataaggcacttaggatctttgcttcttcattagtctgagggtagcaagggtagttccactgcagaggcagtggcagagaggcttttagttgctcccggaggctttgtccagggaattgccaagctgctactggcttgattgctctggcgcagggtggctggaggaccttcccggtgaggagatatgggaatgggcacccatctaacagtctggctgctttttcatagagctcttgtggtatgcttggtgcctgctctggtccctagtcactttgaattttctagtacctggaggtatcaccagtgaaggctgcaaaacagccatgatggcggcctgcccctccctctgggagctccgtcccagggagttacagacctgttgccagcccaaacactgtaggaggtggctggagaccctggttgggacgtcccttccaggaaggaagaatgggattggagacctgcttagaaaagcggtctggctatgttttcatagagcagctgtgctctgttggggcatctgctttagcccctggttgcctcagacactccaaagcctgaaggctagaatggttatgttgcccaaacagcaaagatggcagcctgactttccctctgggagctctgtcccagggtggtttgaaacctgtgtcagccagagaacaccagtggggatagctagagaccctggttaggaagttgcacctggtggtgaggaacaggattgcggacacattttaaaaagcggtctggccatgtttttgtaggacagctgtgctgtgctgggggtcccttcagtccctggttgtcttggactttccaaagtttgaaggctggaacagcaaagtcacccaaacagagcattggtgaggatggctggagaccctggttgggaggtcctgcccagtaaggaggaaggggactggggacctgcttaaaaaagcagtctggccacatttttggagagtagctatgctgtgctgggggaccgcttccacccctagtcagcttggattctccaaagcccaaaggctggatggctaagttgcccaaacagcaaagatggcagcctggccctccctctaggagctccatcccagggaagtttcaagtctctgttggccagaaaacaccagctgaggtggcagaagaccccagttgggaggtcccgcctagtgaggaggagaaacagcattggggatcctcttaaaagagtggtctggccacattttcgtagagcagctgtgatgtgctgaaggacggcttttccccccagttggcttggactctccaaagctgaagtctggaatggctaagtcatccaaatagcaaagatggtggcccacccctccctctgggagctctgtcccagtgaggtttcaaatctctgtgggctggagaatacaggtgtgggtgtctgcaggctctggttgaaaggttccacctggtaaataggaacaggatcagggaccaggttgcttagaaaagcaacctggccacgtttttgtagaatagccatgctgtgctgggagatcccttctgcccctggtcagtttgaactctccaaagtctgaaggctggaatggcgaagtcaccccaacagcaaagatggtggcctgcccctccccgcagagctctatccagggaggtgcaatgctgctaccagtggctggctggatttccaagccagtgggtcatatcctgtgaggtgccgtggaattggggcctgcagacagtcacttctcagccccctggattcagcctctttcctagggttatgtatgggggtctatcctcctgctttgccatagttgcagctgcttttgttggaaagcctgggtatctaaggctcctggtctctgcatgtgcctgagtggctgctctgctgagattccacaaagctctgtgtgtcagactgaatgccgtggtggagtgggttcatgagggaatctcctgaactgagggttgcaaagatccgtgggagaagcatggatccctggggtccctcatttactcaccgcttccctgggtgggggatgttcctctggctctgtgttgatcccaggtgggccattgtcctgtcttagttttctccgttctccacgggtcaagttgtttccttgattagtcccagtgcaagtacttggatgtttcagttgagcgtgctgtatttacttgccccttctgtgcctctccatgagagccacacatgctagctgattctagtcggccatcttggccacctctcatcaattgtatttctatacatttgtgatgaacaatccaaaaacgaagttaagaaaataattcagtttataatagcatcaaaaagagtatatcgcttagggggaggtgtggtggctcacacctgttgtcctggcgcataagaaggtaaggccaggcattagagaccagcctgggcaacataggaagccctcatctgtataacaaaaagagtataccacttaggaatcaatttaacaaaagaaatgaaaaacttatgctatgaaaactataaattattgttgaaagaaattagagaagatctaaatatttggaaaaatattccatgctcaatgactggaagacgtaacagtgttaagatggcaatgccttaaaaactgatctacaaattcaatgcaatccctgtcataatcccagctgatatctggagaaatcatagatattttaaccatttttataatgttataaaatctgtattaagtttgattcaaaggacaggctcaagtcctgtcatttgaaaaaagtaaattatttgtaacactgtttgtggccctgaggatataaaagtgattaggacaaagtttctgtacttctggttatttatattctggatttattattttaaatatatagaagttttactctatggttatgaaatctgtacatttagatttttaaaaagtaaatatttagcacagtgctcttcactttcataggtaaaaaattttaaacatttctttactttatctgaaatttgttttcatgtatgcagaaacaattttttccccaattccctttatcttatattacagtgtggtaactactaccatctatttctgaatatctttctgttttattgtaccaattccacagtgttttacttttgtgggtttataatttgctttaaatatctcacctggcagggctgtagtcctctcccattactttttttaaatttaggggttctattataattgtgtggaaaagtctagaaaaattttgtaaagatgaaactattgccactagaattattttaaaccagtagatttactagggaataactgataccttaaaaatatttattatttttttaatccaaggaccataatgtatcttttccttccctccctccctcccttccttccttcctccctcccttcctccctccctccctctccctctccccatcccccaccctccctccattcctccctccctccctccctcccttcctcccttcttcccttcctcccttccttcctctctctttctctctttctttccttctttcctcatttttgagatagggtctcactctgttacccaggctggagtgcggtggcatgatcattgctcagtgtaacctccaactcctcagctaaagtgatcctgctgcctccacctcccaaatagctaggactacgggcatgcaccaccaggcaaggctaatttttaattttttttttgtagagatggggtcttgctatgttgctcaggctggtcttgaactcctaggctcaagtgatcttccgaaaacaatttacctgccttggcttctcaaagtgctgggattacaggcatgagccactgcactccccacccacctcctacctttttctttgtatttcttagtaaaaaaatttttcccttccctcacttcaggcatcctattaaaatttttgatggttttatatagtgttcatgcttttctagatagggtattcatctttattttttattgttcttttagtttaggttattttacagttatattttcaaactccttattgctgatcttaaaagccgttgcattttaaactttttaattaaccatcttattctacatttggtagattaaagcattttaaatttattctcttgggtattttagttatacagccatttcatttgcacttcttaatttattcagtaaatactcatcatgcaaatactggaatggctgagaaaagagacattgactagaatattaataagtttctttgcagtggggaccttttggtgagtatagacatgggaaaatattcttacatattgagctccttcaagaaggcctaacgtgcttctttcccataactttttgcctcgtgtcttctaagtccttgaccattccttctttttttttcctgttaatcagtgaggatcatagcacacatagcacctcacttttcaggcaaaatagactagaaattgtttcttcagggaagactttctgtctacagtctttcaggtacctcaaaatggggtttttgcattacagcactccactctggctggtgtcagctgaaaactgggctaatttattttcatcctaagtgaacttgttcatagagaaatctcatgtgaccgtagacttgggttgacggtgggctaataaaatgggggaaagaagcgatctggggtgtgtgttcactgctcatgcagtttgcttgtgccttcagatcttaattgggacataatataagtatgacttccttttgattcattcatttattcaacaaatatttattgaatgattactaggtgccaggcaaatattactgtcatcatggggcttacattctaggtggagagaaaccaacaatgaacaaaacaaatacacagaatgttaggtgataaagaaagtgagtgttcaagccacgctgatatttatgtaggcagaggtaagttagaaggttgtagatgggagcggcttatgtgtttgaagtttagaaaggaggcaagtggggctggaggtggatgagtgagacggggtggtaggaaatggggtaaagagagctactgttgctgcaacagcaagaaagctgattggggagggtcttgtgagccagggatgatgaaagggaacatgatagaaggattagcatctgaaagtgggggccactgactgtaagtaaaataaaggatagtgtgattgagatattggagagtgagctagggtaattcctttacacacaaggaggatgggaggacgcctcctctattgcaaccaaatggaaaaaggaaaatgtgggcagctgtggttatgtctgtacttttagcggtagagagttaagggattcttcatttactgactttattctctccaggaagtagaagataaagtatttgctgatagtaatcattttctcttctcatttccattagttctgtctctcattcctcttcaaagttttattactgttggctaggacttcagaacaatgcctttctcctagttgtgatgaaaatgccttttgtgttatactatgcatatattacttactgttcatttgtcctggtgaggaattattttattttagattttaaaaagattttaaagcataacaaataggtgtgtaattttcttgagtgccattttggcatctattgagatgatcacttaaaaaactcttggacatgtttacccttacatttatagatttcttatttaagcatccttgcattcctaagatatacttgattatagcaattaatacttttattgtactgttgaagtaattccactaatttatgttatttgcatttcattgtctctgtatacatttattattgtcaagttattgaatcaaagctatactagtcagcatagaataagttagtaactctccctctgcttctcttttactttcttctattagcttttgcaattcttaaaagcccagggatgcattttagtctctctttccaattaaggagcgctactagccttgttttttacaaagtgtatgtctttgactcagggcttcagaactagcagctgtggtaagagcttaggcaaggttagacctggggatgtggtggcacctgggtccggaggtgtgggatgtcaggacactcagggactattcaaaaccatgtggatactgagtgtccaatgcagtgactttgtcataaccctagaaagtcttataaagagattggcaggctcaggacagatactatgtgggaaactaaaatgatgagtagctaccattttttgagcataatcagcattatcagcactgcacattttgatgctattttcatttagtccttacaaaatcttctgggatagatattatgatttccttttagaataagagacccattttagaaaaagagacttaagcaatttatccaaagccgcactgttggtaggagtggggaattttactcgtatctgtatgatactgctaatattgcatttttaaaagagaaaactcctacggcttgcttttatatttgcagaatatattgtatattttatagtatatttttaatgtaaaggagaataaatatataaatattaaatattatttggttaattcagaattactatctaatttccaacacaatgcctatttagtaatatttaactgcttgtctccatctgctgttgtattagttgccaaaccgagccaaaaaattagaggccctaagccttattcggtgtaatttgttataggacatttagtacttagtacaggaaagcattccaggaaatcacgtagtattgtgagaaaggtgaggaaaatcatggcttcttttttattaataaaggtaaaaattttaagtgctaggtcaaggtaatttggtttcagagagggacatttctgaaggtgtggcttgggaggacaagagatgtacaaaacattgatgaggtcttgggtgatgactgcagtgtcatgagcaagggagcaggagagggtctttgtaagacaatgggacagtttcagtgcgttgtggcttcctccagcgccatgttgaaactggcttatgccagctcctaagatctgattgtgtgcctctctttccatgtccatattcagtgacatcatgatggtagctagaaattagtcatggttggagtatttacacttcagaaattggcaaatactacaaatcaaaactttttttttttttttttttttttttttgcctctagggagccagttgttaagcatttaccaggacaccactaattcctcctttctcaatacctgatcttactgtttactggttaagccatgtgtcaaactgagaaagcaaatgtgcctgagggtaatttgatgaactcctgagcacatttaacgtattacagtgttgctaatttaagaaacaatccatttggaatttgatatgccccctgaagaaggtgttttttttttttaagacaccagaatacaagtcactctttgcattaaaagttactgtaggctgggagcgatgggtcatacctataatcccagcactttgggaggccaaggtgggcaaattacttgaggtcagaagtttgagaccagcctggccaacatggtgaaaccccatctccactaaaaacacgaaacagccgggcatagtggcacatacagctacttgggaggctgaggcaggagactcacttgaacccgggaggcagaggttgcagtgagccaagcccaagatcacaccactacactccagcctaggtgacagagtgagactctgtctcaaaaaaagaaaagaaagaaagaaagttactgttggcgggttataacagtaaagtctctgggtcaaggttaaggacaaatggttttgtctcctggataatttttctgttaaaatatctctctaaatgctactatattgtttactctgctttatttcaatgacattagtataagaaaggaagatactaaaataagaaatcacaaagtaaataagttaagggtaactttaaattaccaaagtattctttcttttgtagaaggttttcttgctatttcttcctttcatggatgttaaatgtattattcatttaatttaccacctttatattgtatctattacataatgtaaagggtgtccatgttttaaaatttttacatgacttggaatttattagataattatcagtattgagtatttgggatccttggctggaattgctataaataattattttaataaagaaagatacccagtaacagaaatcagaaaacttgtttggaggcaccaagtaagcaatgatgaatcatcacattctgggagaggggctccacaatgggggtcatgtttagagcagccttagagcactgtgagtctaggcagactgagcaaaagggaagagatggattcctacaacaatactcaggagtcactaatatgagaacaatgtcaacttttcaccgatgagatattttaaggatgtttatagattagttagactttgtcttgatttctgtacaatgtcaaggacttgttctctagtttcataaattagactgatacatagcaaaaacattcaaatcttgttttgaataacaacattgaaaacactttaaaactacatttctcgctttgttttacatttaagtgtctgaatttaattaaaattgatattttagaataagataatctgcttttgcaaaggatttatgtttttttttttccattgtaacaaattaacctcatggtaataaatgtacttctgaaaacatttcttcttaaactacagctttgaccttgttctgcttcactgctggttccctattgctgctaaagtgcaggttacagaattcatagtttaaatctctttaatattgttattcttaaattttaatgtgcacaagatacactgggtgggcttcttatagatgcagactcctggacatcacccctgggaggtttgattcatgaagtctgaggtagggcccagagacctgctttatttacttatttatttatttgagacacggtctcactctgtcactcaggctggagtggagtggtgccatcatggctcactgcaaccttgatctcccaggctcaacctattatcctacctcagactccagagtagctgggaccacaggggtgtgccaccacatttagctaatttttctattttttgtacagagatgggtttcagcatgttgcccaggctgctctcaaactcctgggtttaagcaatcctcctgcttcaatcccagcaagcctcctaaagtgcttttggattacaggtatgagccacaatgcctggccagatctgcattttcaaggactagtatcagttgcttctaaagctgttggtctttgaatcacattttgagaaacactctcaacagtttcatcaaattctctcactattgttttctttctctagacacctttccttcttccttttaatagagtttttttttttttcttgaaatgagcaatcgttctttttatgattttctaaatgttcagtcatggcatctgtatagaagtctaagcacagtgctttgaacataaccaggcactcattcaatgttgaactgtgttctcttgccacctgggcatctagctcagacaccagcacccctggctgtggtgtttcaagacctttcactatcagaggttgaaattctaatagcatcaaggttttttttttgtttgttacataaccaacccaccttccaggcataaacagagataaaaactatcctactgaaatccctgtacaaacaagtggtgcatatacacttgtccctcggagcttggcatctcctccttgatttctgataagccaaggaatttccatggtccccatggagtgtcagacagttctcaagcacataattttaaatctggaaaatgtaactatcaaaataaattaaaatatattttgtggaggagttggataatgagaatgatgaattttctaaaaagtttgaggatcactggaatagaagtgttcaaaggcatttaccttttgggcagatgctttgtaatatttttccttgaatattggacacaatgtaataaataaatgaatctccaaagttcccagttggaaaaacatgcttattagatggagagagatgcagatacatcatacatatattaaggtcggacttggtccaaatattcccacatttgtaacctatttcattgagaggtcaaaatggttcactttctgaaatcttataagccttgtttttgaggggaaaaaaaggtagttggtgctatctgggactgtcattcagacctactttaaatcttatttgattgtgttttttcaggtcactgttcttttaatatttgcatagcttaatagattcaacttacctttattttatgcctggttattgggataccactgtgaattgctggttatgttaattttttcttccttttttttccttactgacaacaccccaaaacttatttttaacccactttcttttgttactttttttccttggcttaagcattgattacacatttattaatagacaaaatttctagtagtcaattatgtaccttccaatattgagatcaatttttgctcaattctcaaaattttgagaaaagcaactgatccaaattttatttcttcacagttaaatcactgccttttaacaccacatacatttccatttattagggaaattactaaatcaaaggtattatatttctctttgaagtaaatgaagaaataatatatttcagtagaattaccactcatgattgtgaggttaaagtgatttttgaattggtgtttatttgttctattttaggtttatttgtctcttgtctatttttggaggagatatggaggtttgtagctgccttgagtttccaaaccaacgattatacttctctgaacttagttccatttggtccatgtaatgtctactccagaattaatgtctgctaaaagagatcggatggaagaaagacaagttccttagttttaggacttttcttttttctattcccttcctcattcccatttagaaaaaataggttgtcttgaaatagttgatattgaagagaactaaaagacaaactgtagagttgttaatatctgtttaaatctgagaggaagaagtataatttttttaaagtaagaaaatgaatagacttgttttatatcacgcctgggtctatagttgataataattgttacttacctacgccttcttactcttattgcttccccttgggcctctaacaacagaaatcatagatcacagatgcccctgtatttgcatttgttagatgagttggagtagtctggaaggcattgtctctgtcttcccttcctcagggggcatgctttatccttcctgctgctacagcctgtcttcctccccatgatactcttattgatcagtagtcactgaccacgcagagaaggacaggttatttcatttattgctgaatgatatgatcagtgagtttaagaagttggttgttagggtgtctgaacagctaagaacagacgataattgggttattctgctgatttataagatggttttgtactcactctaggtgtttatttttcaaagtgaactaacttctcattaagtacttttcaaataattgtgttagtttaatattaacagtctcctgcaagcctggtggaatttttttctcattattttcccaaagtgtatttgtttcataaatttttatctttaagtttttgcattcatttattcattcatctcttcattaatggattttgaatgcctgcagtgtgctgcacaacagagaggttgccagtttgtgtcttgcagaccatgtttcagttgttttcctgttactctcatcttggctaatatttaaagagacctgagtttttctttttaacctctgcataattaaaacactggatgggattgtttccctcagttagcttcagtttttactgttacattacattgcaatttggggtgatgcaattctttacaagcactataaaaagttggacttagaaagaatgtatctctgtaaggcatgttgaaagcaacttgagagtctgttcttggaagagtctttaatctaaggcatatcaactacaatttccattttaaatgtctatttgcccttgtttctctcattccctatcaaaaccctttttcttgacatgtatatgatatacctgacttttcatcattgtactattttaacatttttatttttctgtgtacatgtctaccaatatttatattagataccatgtaggcatttcattgatcatgtactagtgcagaattcagaataaacataaatatatttaaatatgatactggcttattttgatttagaatgtaggtgtaatctttaaaaatggtctcaattgtttattattgtctaaattgttgtttgctttaaaataaaattttaaattattttgtatctgtgctattgagatcattaaacttgagtattcattaaaaaaactcatgaagaacacatacttaacaaatgtttattgattacctttcctcatgtgaaagctgcatttttttaggtttctgaaggataaacaaagctacacatatgacaaagtgcttacactaagcgggttatactatagtgtccaacaggtatggtgagcatatgttcaaattgaggatggctaggaaaaaaatttacaagacaaatacatggtggatttagcaaaggtggcttgggtatttattctcacctgttgggcactacagtataacccttttaatgcttagccaaatccttaaatacttcctggatactataatagcagagttacccacaggagtgatatgaagaaataatatgactgaggaaggtatacatactgcaactgtagagtgaggaagaatagtggaggtgaatgtttagaagtcaggcctggagaatactccccctcaggaaaagtcagccctcttcctctttgtgccgccccacttctggactgagatgtctaccatagagtccatcttggtgtgctattgactggtatatttgtgttcatcctaacaggatgtttgcttctcaagggcagagaccagtgtgtaaagcttaatatccttgttcatagtatccctactttatgggttcattgttttccccacatattaattaggaaagaaagtgaatttattgaatgaacccctaaccaaaccacacatatttcccatttctgtgtcagtgctatcattttctaattatgcccaacagcagtaacttgtaatatgtatataataaaactgagtttctgtggttaaaggaaaacactcagatatcaatacatataaacccatatgccttttttgcacaagggggtttgtgattaaggatgacatactaagatttatattttgctattttttatattggagggtgacttctttgcattttcggttataaaaatctgtttgtattttttgttcatatgtttgaattgaggatggctaggtaaatgattcacaagactagtacagagtggacttagcaaaggtggcttgggtatttattgagcaagctgttggggaaagatatttgatgtcttagatccagaatgtttttaaatgctgctcacttgatttttttttttttttttttttttatggaataagggatctgatactctttttctgcttggagtctggacctcagttactgctctctgagatactggcacagagttaagcctattccaaggaaccatatgttaagtcctagttataagttgctgaaatgaaagttgtagagatatacagcaaacttttatgtaaggaaataagcatatgcaaaactaatacatgtatttaaactaacacaacctcaaaggaataaaagaacgtaagtggtacaccagtgcaaagggaaataataggtgaatattagatgttaattgaaaatttcattcattcattcatttcacaaatatttattgggagcttctatgtaccagacacatattgaacgaagtgggcaattttgaatttatggggcaagacacgcaataaacaaaactaagtaaattatgtagtattttagataatgttaaatgctatggaaggcaaaaagtttagggtaagggaactgggagtactggattgcagttttatggagtttttgtatgtcactaagtcttcctggagctgaaagggtgatccaagtggctatcttgaggaagagtattccaggcagaagcaggagccagtgcaaggctgggtgcagtggctcatgcctccaatcccagcactttgggaagctgaggcaggaggactgcttgtgttcaggaggtttgagactagcctgggcaacatagtaagacttcatctctacaaacagtcaaaaattagccaggtgaggtggcatgcatctgtagtcccagctgctcaggaggctgaggtcaggggaccacttgagcctgggtggttgaggctgcagtgagctgtgatcctgccactgtactcagcctgagcaacagagtgaaacactgtctcaaaaaaaaataaaaataaaaaataaaaaaagaaaaagaaaaagcctgtgcaaagccctaaggtggacacatgcctggcttactgaggaaaagcagtgagactagtgtggcctgtagcataggaaattcttgtttttgtcaaccaaaaataaaattctaagcccaccaaccatttgaatagacccctcttcttggccaagggcattccaaagttaacctgagaaactagttcaggacatgatggggaggggtagggtagtcatgcctcattatacccacctccgttttggaattaccaatagaacagactctttaactctgataagaaatatttacaatctattatctctaaaacctgctacctggaggcttcatctacatgataaaaccttggtctccacaactcttaccttaacccagacattcctttctattaattctaagtttttagacaataacttaactctttcaatcaattgccaatggggaaatctttgaatctacctatgacctggaagccccctgcttccaattgtctcatttttctggaccaaaccaatctatatctgatatgtattaactgatgtcttatgtcctgaaattgtataaatcatgtgtagcctgaccaccttgggcacatgttttcaggatctcctgagggctgtgtcatggccattggtcactcatatttagctcagaataaatatcttcaaactttttatagtttgactctttttatcaactttttttatgtaatgggtgaggattagaatgtcttggctgattactagtctggctaagagggagtaatcatttcccctatgaatgtattattgatttttgatagaataaattcaataaagtatattttaagaaaaaaaaagttgtttgaaacaggggtcagcaatctatttctgtaaagggccagatattttaggctttgcaggacatagtgtctctgttgcagctactcaactctgctgttgtactgtgaaagcagccacagacaatatataaatgaatgggtctggctttgttccaataaacttaatggtctctgatatttgaatttcatacagtcttcacatgccaggaaacactattcttaaattttttttcagccatttaaaacaataaaaaccattcttagtttagagactgtacaaaaacagatatcagattgggttggatttagctcagaggccatattttgccaacttttaaacaatgtatttatttatttatttatttatttatttatttatttatttatttgtttatttatagatggggtctcactctgtcacccaggctggagtatagtggcgggatctcagctcactgcaacctctgcttcccaggctcaagctatcctcccactacccgctgcagtggctgggaccacaagcgtgtgccatcatgcccagctaattttctgtatttttggtagagacagagtttcaccatgctgcacaggctggtatcaaactcctgagctcagcgatccacctgccttggcttcccaaagtgctgggattacaggtgtgagccaccatgcccagcctcaattccttacttaaaatacaattaaatttttgttaattttcagatgatatagtactctatagtgcctaaggaatgttggtccaataatcacttattattgtacaatattggaaataagttgtcttggtgtgagttcatattaaagtgtttttttttgttttctttttttttggtgtttccttttttttttttttttttttttttttgaggcagggtctcactctgtcacccaggctagaatgcagtggcaaaatcacgtctcactgaagccttgaccttctgggctcaggtgatcctcctgcttcagcctcccaagtagctggaaccatgggaacacatcaccatgcctgactgatttttttttaaaaattattatttgtgaagggacctcgctgtgttgcccaggctggtctagaactcctgggctcaagtaatcctactgctttagcctcccaaagttttgggatcacaggtatgagctactgtgcctggcctatattaacgttttaatcctctatgagagtatcctacatcattgcatttttttttccaagaaaagaatgatgcaaaattagagaaaccaattatttgcatttttggttcacagggtttcatttaagagactattgtatagataatatatagcacagttatataaatgcatggatagtaaagagttcagaaacagaacagttaaccattggaaaaagtgttaaatccagtaagatgacaaattcaaatgtttcataaaggagaatttcagaaaatggatttttgcaattcacactttgttattgaagtcaacttcttaaaaatcttgtttagcaagtaattatgagatgttatttcaaaaattttaaatccattacatatcctcattcaacaatgaggaaatgggggaaatggaggaagttgaccgtagaagcagaggatgaacaggtagaagttgagttggtagtctaagaggttttttccttttttttggtttgaaaattactgaaaagtgtcttcctaaaatgatttttatttttatctcactcggaaacaagagacaagaggctaagattgggaataatggggattggcgtgggatgttggataacctacttcatatagggtgatcaaaaggactttctaaggaggtggcatttcaggtaagattctaaggattagcagtgatacatatggaaagtgggagagaatgttctaaacaggaggatttggtaagtgcaggaatcccacggtaaggcagtttagcatgctataggaaactaaagaagaccgacatggctggatcatagtgagaatgtaggagtgtggtgccttgcgcagctggagagacagggaggggaagatcttgcaagacctgcagttttaattttattctaattgcaatggaagtctctcaagagttttaagacaaggaccatcatattctgatttacattttaaaatttctttgtgcgtttcaaagaccatattgttaggaagcatttgttggggaggcaaaactttttctctgctctcttagttcagttacctggggcctgcaaatgaaactgacaaaagacagattagcaagaaaaaagatatttttattcatgtatgtactagagttcacagaaaaatgtgactcaaaggggtggttagaatttgggacttacctactatcttaatagggaaaggggagggacagaagggcacttactggaaagcagtcaacttttttggaagataggtgggcctttgggagaacatgggagatatgatagctttgtgacaatgtctattttggtgtggtgtggtatttggggagactggggagttgtgctaagctaatgctgattgacaggcattctttctctgcttatttgctgttggctagaagataaggtaattgtgaacttgtgataggcatgtgcttgaatattcctgtcttagtccatttgtgttgctgtaaaggaatgctgaggctggataatatataaaggaaagaggtttatttggctcatggttctgaaggctgtacaagaagcatggtgtcagcaactgcttctgatgagacccttagaaagcttccattcatggcagaaaatgaaggggagccagcatgtgcagaacatatgtcaagacaggaggcaagagagaaagagagaaaggaaagaaggatgaggctctttttaacaaccagctcttgggggaactctcatgggaactgatacagcgagaactcactcattactgccaggatagcaccaagccattcaggaggtatctgcttcatgacccaaacacctcccattaggccccacctccaacactggggatcagattttaacatgagacttggtgggaccaaacaaacgatatgcaaaccatagcaatgcccaatgctaggcagtttggtgaactgtccgttacatattcatttcaattggtgcagtggtgggattaccttgcagtgggagctatcagaagtgacacaagaggaacagggaacagatagctattcctttaatggcagcatggtggaaggcaggtggagtttgtgatttttgtgagtgggggttgggggctgtctttggactgaggcttcattttttccctttatgtctctagccttatcactagtttcaaaatgggtgtaataggacttgtgttgtctgccgtgctgttcttatgtgaatttcttacagcatgtatgtatgttggagaaaaggatgtgcattatccatcaaggcttctaatttgactaggcttagatattttttaaaaatgttactcatagtttaagtgttttaaatttcatcataacagcctgaaaaaatcagtatttctcagcaaatactggagctgttatatttgaatttacttttcaagagcttattaagaataatttcaggcatattaataacaataacttcccttaatatttatgtagaatttcagaatttctctaagttaagataataaactagctaaacaaagtaaatttgtttgctttggccccaccctgccatttctatatgtttttactctttgcgcatctcctctctcccaggcgcctggactttcatatcttcctagcaccttgaaagcctttgcaagagcatctgataagttcatttacactcagatacaagtaactgatacattttaaagtgtttaatatcgcaaaggtctttgaattttagcagagaaaatgagaggccgtatatgttacagagatcaatctctactagtggagttttctgttgggaaagtgagggggctttgcttttgcttttcttcttgtttgtttgcttttaatctgtaggggctttttcaagctcttaaaattacaccacctatgtggctacagctctgcttctacccagggttagcacctaatggtaattccatcttcagtaagttcggagtgctttataaattatttctgttctttaaagcactctacttgtagcaaacagacagcaattacatctgtttgacagctgatgaaacaaatacaacattttagagaagcaaaataacatttgaaagcacctggaaaggtgttaatgcattatacaaataaaaattttgattggtaaattgtttaagacctcacaatttaagcaggctcactaaatttttaatcaagatactaatgtataatggatagggaaagtaggaggagttaatactgaaatgttttaagaatgatccaggttaagaattctatttatttgagtgcccaagttaaaccatcatttttattttttaggtttttgggtgcttgagaatggaagggtgatattgtaaactgtcaaatggccaatgccaaggtgaaaatgtccacattatatagataagcttacacctgaatgagcttctcattaatgaccactttagagagaaaatggatggcagctcctcacgaataacttgggtaattgaaagaaatgctgccaaggaaaacaactactatgtgttactggttctactggaaccctgttaacatacttcctcaaacagtttcctgaaagagccaaattcctgaatggtaatctgaccaaaacactaaacaactcctgtggttaaaacagaatccacaggattctgttttcattagaggaagtactaaggtcaagatttgtaaactacaactaaattatgaaaatgattcttcttcctagtattcaggcactcaagagttctgaaaaaatgcagtgttatgtgacttcttcaattatgtaatttgtttagatagattgtttaggaagtgcctcattttatttgattctcatatgaaaaagaatattcttatctgttacaatttttttaaaagagaaaagcataaagttactaaaaaataaaatcttttcttatcatacagagacctcagaaatttatcattttcatgagataaatcacttccctattcatagactgttttaatatgggaaattgtcgattatattttaaatataagtaaaatattactaatttttgtaccattaacaaaaacatattactccaccaatacctacttctagtttaagctcagtatataaatagaaatgttaggcctgggttcttcctttgaggacaaggatcaagaatccaccaagggtagggtggggagtgtggaattgcaagtgcaggcataagaaggggtagcaaataaacacatgaaaagatactcaacatcagtagtcttgagggaaataaaaattaaaaccataaccaggtattattttgtgttcgtttgagacaggctctcctgctgtcagccaagctggagtgcagtaaaatgatcattgcttactgtagcctggacttcccaagcttgagcaatcctcccacctcagcctcctgaatatatgggaccacaggcacatgccagcatgcctggctaatgaaatttttttttttttttgtagagacaaggtcttgccatgttgccagggttggtcttgaactcctgggctcaagccgttctcctgtcttggtttcccaaagtgctgggattacaggagtgaaccactgcacctggcctcacaatgatgtattattatacacctattagtatgtctaaaattaaaaagactgaccatacaaagtgttgactaggatgcggaggaactggaactcttacacactgttggtgtcaaatgtaaaatggcacaaccactttggaaaagagttttgcactttctcaaaaagttacacatgtaccatatgacccagccaatccactccaaggtacagtatttacccaagagaaatggatgcatttgtcctcacaacaacttgaatacaaatagccagaaactggaaacaacacaaatgatcatcaacaagcgaatggacaaacatattgtggaacattcatgcaatggaatacaacttagcaataaaaaggaattatgtgctcaatggctgggggaacattcatacaatggaatacaacttagcaataaaaaggaattatgtgctcagtggctggggtgaatctcaaaataatgatgcagcgtgaaagaagccagaaaaaaaagagtatatatagtatgattctgcagatggtctccaacttacagggttcagcttaacaaattgttgactttatgatggtgtgaaagcaatatgcattcggtagaaactataatttaaatttttatcttttctggtctagtgatatgtggtaggatacttggcagtcagtcaaccatgagatcatgaggtaaacactgatattcttcagcatactgtgttactagatgattttgcccaattgtgcactaatgaaagtgttctgagtgcatttatagtaggctaggcttggtaggttcagcatattaaacgcacttttgacttaaaatattttcaacttatgatggatttattaggacataacttcattgtaagtcaggggcatctgtatttatataaaaatatagaaaatgcaaattaacctatagtgacacaaagcccattagtggtttttggtggaggatgggaaatggttctgtgaggaagaaggaattaccaaggagcatgattaaactttttggggtgatgaaaatgttctttaacttggttataatgatggtttctcaggggtacacacgtgtgtacttacaaattgttcactttaaatatgtgtactttattgtatatcaattataccacaataaagctatgaaaatatgtgtccatatgccatatcgctctaattttgtggcttaatcatatgcaaaaactcctcatcttcctcttcctcctcctcctccttctcctcctcttcctcctccattttttggatggggaaaggagggtgtgctgtgtcgtctggtcatgctttgatttctgttctctgggtttcccaaacacattaggtaataaagacaacatgactaattacatacatttttttaaaggctaaattctctttaagatattgtaaactctatttgcctcatatttgttcagtacttacttcaaataataaaacctggtggttgctttatcagttctaatgatcctggtgactgacattccctcctgttcttttacctaagacatgatgattactttgataaaacacacactttgatctcaaggtagggaagatgcaaatctcatattctgaactctccaaataaatgtaagacttggtgcctacttggttatcaagtgacaaaattattgaaataggagccaaactttgaaatattttacatgcggtgttttgcattatgaaagtttcgtttgtcatctacttgattttctcttctttaactgtgcttatgtttggcaaaaccattctcattctctaaagtttaggggtttatctaattgttttctctagtggtcaatgagcatcttgagagtgaagaccatgccttatttatgttgtattctaaacacctccttatagctcctgggaaatttataggcatttatataaatgctccttgaatgaatgaatgtgttcccccaacatccttactgaatactgaatttgggatcttgtgaaatcctactcagtttaagctttagtggaggtgttgacaaaaaactaagctctgtaaaacatttcaaaaggtttattatgagcccatattaatgactatagcgcaggaaacagcctcaagaagtcctgagaaagtgagcttaagtggttacagattggttttatacattttagggagatacaaattgtaggtaaaatcataaatcaatacatagcaggtgtacattggttcagcctaaaaaggaagaatatcttgaagtgagagttggggtgttacaggtcataggtagattcaaagattttgtgattggcaatcagttgaaagagttaagctttgtctgaagacctcaagtcagtggaaaaatattcttgaattaagataagggaggttgtggagaccaaggttcttgttatgtagatgaagcctccaggtaacagccttcagagagaagagatggcagatgtcttttttggggaccttaaaatgtcacacttttagttaatcctttcttaaacctgggaaaagcctggctgcattaatggagattatctgcaaatgcaaacttcctccataaaagatggctttgcaggaccatgtcaaaatatgtcaaagaaatatacttggagataaaacattttgattttctttaggatctgctatctgtcatgtgatgctacatgagtcaggttggaatttggtatcttattgccacaaagagtttgttttttcggtcttaatgatctctgttttaatggtaatgctggtcagtcagttgtgtctaaactctaagagggagggggtgtaacaagacatgtccaacctccctttccatcacggctgagaattcaaattttcaggtttctctggggttcccttggcccagaggggatccatttcaatcggttggggaggcttaggattttatttttgatttacaggggcaaatacagtagaagtttgtattccatgaaaatttaataacacaaaatttagtacatggaatttattataaatggaaagactagtacatttattggctattttgaagagagttattttgcaatatgaatcaatgaataacttatatcattgcttctttgcttctatagaaaccaaataactttctatgactgggacaggtagtacctctatgtttaaataactattttctcttagagtgttataatttgtatttctcatcattaatagaaccagttttactgccaacatgaataaaacactctcctttttacattattttattctctcaattcagagagttagttattatgtcatggcttttggtaagaaatgagtgataattctaggtatttccatgatagtcctttgttggaaggaaggacttcaaaactttaaaataatcaaatttcaactaaataaaaattgccatataagagatgatctgctaaggtatctagaggactaacatctatgccctcacactcatatctagttcttgcagatttatttctttcaaacatcatatgctagctgaatgtgatgcttgctatcgcctacttatcacaaactttgctgctatttttttcctttgtaattaaatgccatatgcacaccttcaattaagataattacatttatgattttagtttagtcaagtcatctggcacttttcatgatatcagttatctgacctttaaatagatgagaacttagggaagcatttagcatgccccatgcgcaattctttttttttttttttttttcctcccaagatagaatcttgctctgttgcccaggctggagtgcagtggcgtgatctcagcccagtgcaacttctgcctcccgggttcaagcaattctcctgcctcagcctcccgagtagctgggattacaggcacatgccatgatgcttggctaattttttgtatttttagtagagatggggtttcaccatattggccaggcttgtctcgaacttctgacctcaggtgatctacccgcctcagcctcccaaagtgctgggattacaggccaccatgcctgaccccaattctttattttatttacaatacatcattttctgacctcatttaaaaaattttaactgaaggatttctagtagacaggaaagttgccaagaaggtttagctttaaaagaaatgcctttataataaatggcatagaattcccattatgcttttgttttaatttgttgtaggaaagtatgggatgtgggatttagtttcctcaccgttgtggtcattgtcctttttcatatactccagtttgtcagtaaagctgttaaagcatgacatccaatactgcatgcaatccctgtgggctcaacctagcacataactcagagggactactgccccttctgttgtggacattaacctgcaattaactcagtcttagatcacattaattttggggccaggacactttattactggttcatagtgaacttgcagcccattgtaactgccaaattttttttcttttttgcactttgcctggatcctctattagcattgatttaagaacagtactttgcatgtattatcatagtaaatctcttttgctaaatttgactgatgattccagcctggtgagataattttgggtcctgattctcttttccaatttggttgcagtttctcctttgtggttataataagcttactatctaacctcgtccaaattcctgggggaaataatgcttgttagaagtgggtcaaggagtttctggaatagcatcttgttcttcctcacacattcttacccttctttaatttctggatgcaaagtatattgttccttgttgacaaaatggaaaatgaaatcctcttaagatagtaaagtggctgtcaactgtaatgctcttaaatcactttgctgcttagtgctctcacagctgatacgcagttccctctgtgggcagcggcgttttacatcagatcaccttccatttcaatttagcatgcctgctcactcctgcaaggggaggtttagtccttggtaacaagtctagaaaattctaaattacaccaaaggaaaacaccaccaggagatggaggatttttaatgaaaacatattttcacagtgtggcatttcaagtagaataactagaattgtggaaactggggcaacattgtgttatgcaatttttcctgagaaagctaaaaatatgttttcagcagagaattaatgaattgtagtgatttgatgctaagcagttctgttttaattaaaatatttaacttactaataaaatgtcagcacaatttgaaggtagagaagttctgttggaattaaattaatattctcctttttaaacacctggctcagcatgttaaaataaaatttgaagtacttctgtgggcagtactgctaagtgatagcaaccttctaccttgtagttctagctaggtgggctcttggctcttactctcttatgagtaagtgagttgctggataagtgttatcccttagccatagaatagttgccataagtttactgcttgcatggctgcattggctaaatgaactgcttaatggtaggaaagctatgcaccactgtactttagaaaatttgataaatgtgcacttataaaagataatacatttcatcatttcaaagagaatatgattccctaaaatatagttattttaacttttatggttacacaaaacaatgataaatcaactcacttttttccaatatattaagtgcactgtgtgtttccagctgtgtggcagatataagggcatcagagaggaatatgagatagttttggcccatagaccagaaggggagtcaaagacttaaatggtacaatgtggtcaataaaatgataaagctattatctatatctttatacatatccacacacatgaccatacatatttccattcccataactataaccatgtctattgtgggaatatggaggagagatacctgccctaataggtgagaggcataggtagcattaaaggaaaattttctgttgaagagatgcctaagttgaatcttaattagtagaagctaactgggctgtattagtctgttttcatgctgctgataaagacatacctgagactgggcaattgacaaaagatagaggtttaatggactcatagttccacatggctggggaggcctgacaatcatggcagaaggtgaaagtcatgtcttacgtggcagcagacaagaggagagaggttgtgcagggaaactcccctttataaaatgatcaatctcatgaggcttcttcactatcacgagaacagcatgagaaagatccgcccccataattcaattatctcccaccaggtccctcccatgacatgtgggagttgtgggagctacaattcaagatgagatttgggtggggacatagccaaacatatcattctgctcctggcccctcccaaatcccatgtcctcacatttcaaaaccaatcatgccttcccaacagtcccctaaagtcttaactcatgtcagcattaactcaaaagtccacagtcgaaagtctcatctgagacaaggcgagtcccttctgcctatgagcctgtaaaatcaaaagtaagttagttacttcctagatacaatgggggtacccactggataaatacacccattccaaatgggagaaattgaccaaaacaaggggataaaggccccatgcaagtctgaaatccagtggggcagtcaaatcttaaagctccaaaatgatctcctttgactccatgtctcacatccaggtcacactgatacaagtgggctcccatggccttgggtagctctgcccctgtggctttgtagggtatagcccccctcctggctgctttcatgggctggcattgggtgtctgtggcttttccaggtgcatagtgcaggctgtcggtggatctaccattctggggtctggtggatggtgaccctcttctcacagcttcactaggcagtgccccagtaagggactctgtgtgagggctctgactccacatttcccttccacactgccccagcagaggttctccatgagggccctgcccctgcagcaaacttctgcctgggcatccaggcatttccatacatcctctgaaatctagacagaggttcccaaacctcaattcttgacttctgtgcccccgcagactcaataccacatggaagctaccagggcttgggacttgcaccctcagaagcaacagcccaagccataccttgcccccttttaaccatgactggagtggctgggatatagggcaccaagtccctaggctgcacagagcagggggatcctgggcccacaaaagcattttttcctcttcagccttcacaactgtgatgggggttggggggctgctgtgaagacctctgaaatgccctgtaggcatttcccccactggcttggcaattaacattaggctccttgttatttatgtaaatctctacagcctgcttgaatttcttctcagaaaacgtgtttttcttttctttctttctttcttttttttttttttttgagacggagtctcgcactgtcacccaggctggagtgcagtggtgtgatctctgctcactgcaagctccacctcccaggttcacaccattctcctgcttcagcctcctgagtagctgggactacaggtgcccgccaccacactcggctaattttttgtatttttcagtagagacggagtttcaccatgttagctaggatggactcgatctcctgaccttgtgatctgcctgcctcagcctcccaaagtgctgggattacaggcgtgagccactatgcccggcccagtgtttttcttttctattgcatcatcaggctgcaaattttccaaacttttatgctctgtttcccttttaaaactgaatgcttttaatagcacccaagtcatctcttgaatgctttactgcttagaaatttctcccgccaggtaccctaaatcatctctctcaagttcaaagttccacagatctgtaggacagggacaaaatgctgccagtctctgctaaaacatagcaagagtcacctttactccagttcccaacaagttcctcacctccatctgagaccacctcagcctggatttcattgtctgcattttggtcaaagccattcaacaagtcgctaggaagttccaaactttcccacattttcctgtcttctgagccctccaaactgttctaacctctgcctgttacccagttccaaagttgctcccacatcttcaggtatctttatagcagtgccgcagtccaccggtaccaatttactgtattagtctgtcttcattttgctgataaagacatacccaaggctgggtaattgacaaaagaaagaggtttaatggactcatagttccacgtggctggggaggcctgacaactgtggcagaaggtgaaaggcacgtctcacatggcagcaaacaagagaagacagcatgttcagggaaactcccctttataaaaccatcagatctcatgagacttattcactatcacaagaacagcatgggaaagacctgtcctcatgattcaatgatctcccactgggtccctgccatgacatgtggcaattgtgggagttacaattcaagatgagatttgggtggggatgcagccaaaccatatcacaggttatgatgtgtgtgtatgtgtttgtacttgtatttttatgtgtatgtgtatgtatgtggaggcatctgtgtgtttgggagaacaaggaaaagggctgtgatgttcctgaaagtgagttggaacagaagcttggaagtgagaaacactgtgaggttgctggagtatatagtgtgtctgtgtgagtttaggttggagtgggatacacaaggagctcgtggacaaagggaatccatcaaaggtgttggagcaaggggatggtatagtcagctttacatgctgagtggattgctgtgattacaatgggcaggatagatggaacatggcaagatttggggtgtgactgtggagtaagctgtccagatgagaggtgatagaactaccctcacttggccttggtgatagtgatttggggagggggagatcaataaatttttagaaagtaatgtcagatagatatacctatcttatatatcttttgttacattcgtttctaagtaccacatagtttctgctaatgttgcaaatcatatttctaaaaaattatggttttgaattaattctcatggttgaatattatgtagcagtaaaactattgaactgcagccatgtgcatcaacagtaataagtctaggagcataatcttgagtgaataaagcaagtcccaaatgaatgacttcatttgtataaagcttaaaaacaaaactgaaaaatgtgttggttagagatgcacaggtatgtaataaaccaatatggaaaaggagataataaaataaaattaaaaatcatggttaattctcatggaggagaaggtgagagaatgaatacagaagggggaagtatatgggtgaatggaatggtattggacagttttgattcttatattagtggtgggttcatgggtgctggttttattattatttttcattatatatatatgtcaaatgtagtattttgtattatttgatatattaaaaagataataagggaaaaacagatacataagtagaaataagggcaagatatcctcaggtttctagcttgggttacgggatcagtgatgatatcaaataaatagagacaactagaggtttattcaggaacaatgatgagctaaggttcttgaagcacatctaaacagatggatatgcaagcctgcagcttgtgggggaaaatctaggctacatatgcagatttgtaagtcataaatatacagttgtctttcaaaccaaaaaatggataaaattgccccggaagaattaaaaacaacaacaacaaaagtgaaaagaaagtaatcctgggaagcaccagcattgaagtgtcaggagacagagaagtccataaagagaaggaaggggtcaaaagataggaggaaaagtgagtggcatcagggaggaagccaaggaggtaaagtgttatgaagggaggggtgattatcagtgttagatacaccaggccatttactacggtgaggtctggagttaggaggtttgtgctgaccttagcgaactctgtttcagagctgtggggacagaagccaactgaagtggggagaggggtctggggagccagacagcgggtactgtggagggggtagaggaatctttgtagaaatatgagtgttctggggtgaatagtgccctcccaaaattcaagttctttctcctggaacctcagtataggactctattcaaaaataggatctttgcaaatgtaattgggttaaaatcaggaatgaagactggattaggatgggttcaaatccaatgactgctgaacttataaaatgagaaaaatttggacacagacacactgagagaacacaatgtgataagaggcagagactggagtagtgcatccataagccaagccattgctgacaaccacctgaggctaagaatgacatggaacagatgcttccctagagcctttagatggccctgccaacacttcaacttaggcttctaggctataggactgtgaaataataaaatttatgttgtttaaagttaccccatttggcatactttgttatagcagccccaggaaacaaatataatgaatgataactagtgtgtgattaggtaaagagagggctccactttttataggatggatgagacttagtacatttgcagaacaagagaaagtggcagtgttgaaaggtgcggactttaagaggtgattggatcttgaaggctctgccatcatgaatggattaataccttcgtgggttagtggattaatgggttaattaatgggttattatgagggtggaactgatgatttcataagaagaggaagagaaacctgagcagatacattaggagagcagtaaaggataaagataagggagaaatagggaatgcttggtggagcacaatcctggcagtcccaagagccatgagctcaggggcccaggcagagttcatcggttttaaaatgaaaacagtgtactctgtgactggaagaaaaaaagcaggatggggtgaggtggtagttagattgtaggtaagagagcaggaagtaaggaagtgcatccttgatgacttcatttttcttagagataagttcttctgctgaggatgagggtaagggaggcagttgagttggaagtagtagtggaagtttggaatagttgttcaagaccagaaggctgaccagagactacctataattgacagttggcatccaggtctcagctgagtttggaaaccattgatttgtattaaagatgcactacactgttctgagatgtttccagacagcgctcagattcctgaggtttacagcaggaaaagtggctcctagagttgggattttataagatggatgcgatggagggatgttggtacaaggaagaagagaagaggatgttggtgagacaatgagctcatgaccagcagtgcactccagcctgggtagaaaggaagaggtagagggcggaaggacatgaaagactttatggtgacagtgacaagagcagccatgaggtcagctagaaacatacttttaatccatgtgtttttgacaaggtatggccattgtcatctgtgaacatttaatatcccatactgtactcagaactaaagtacaatagaaaataataagtgctgatgaggatgtggagaaattggaactcttatgcattattggtaggaatggaaattggtacagccattgcatgaaacagtttggtggtatctcaaaaagttaaacatacaattaactataatataatacagcaattctacttctgtgtatatactcaaaagattggaaagcgggggcccaaacagatatgtgcccaccaatgttcacagcagcattttttacaatagctaaacaattgaaacaaactgtgtccatccacagatgaatggataaacaaggtatgatacatacatacaatggaatattactcagccataaaaaggaatggaattctgacatttgctgcaacaggatgaacttgaaaacattatgctaagtaaaataagccagccacaaaaggacagtaccttggttcattatctgctgcctataatagaatacccaaaaatggataatttataaagaaaaggaatttatttttcacagttatggaggctgagaagtgtaagatcaagggattgcatctggtgaggaccttcttactggtgggggctctctgcagagtcctgaggtggcagagggtatcacatggttagggggaagagtttgctaatgtatttgctcaggtttcactttctcttcttatgaaaccattagtttcatcctcatggtaacccattagttaacccatgaatccattaatccaagaatgtaatcatcaatttatgaagacagagctttcaagatccaatcaactcttagaggctcctttcactgctaccgcagtagggattaagtgtctaacacattcagtttatagacacattcaaaccatatagacagatactatatgattccacctatatgaaatactgagaataggtaggtaaattcctagagacagaaaatagaatagaggttaccaggggttggaggaaaggcagaagagagaattattgtttaggagaacagagtttctgtaagcagtggtaatggtcactatcttagtcaatttgggctgctataacaaaatatcacagactgggtagcttaaacaacagacatttatttctcacggttctggagattaagatgctagctgattcggttcctggtgaggcccctctttctggcatacagatagccatcttcattccatgacctcatgtggtagagagaaagcaagagctataagaagagaccactataagaagattcatgagtactcccctctcctgatttcttctaaacctaattacctccccaagtcccctcctcccaatatgattacattaaaggttagggcttcaacacatgaattttggggagacacaaacattcagtctacaacagttacataaaactgtgaatgtacttaatgtcactgattgaacacctatcagaatggtgaaaacctaaaaactaacagtactaaatgctagcaaggatgtggagcagcaggaattctcatttgttgctggtgggaatgcaaaaacagtacagccactttggaagacagttcagcggtttcttaggaaactaaacatatccttaacatattatccagcatccttaccttgccatttactcaagtgcgatgaaaatttgtgtccctacagaaactggcacataaaggtttatcacagctgtattcataattgcccaaacttggaagcaaccaagatgtccttcagtatttactttatagtaaataaactatggtatacccggacaatggaatattgttgagtgctaaaaagaaatgagccttgaagagacatggagaaaacttaatgcatattactagtgaaaggtatcaatctgaaaaagctacatattgtatgattccaactatgtgacattcctgaaaagacaaaactggagaaagtaaaaagatcagtggttgcctggggttaggggagagggagagatgaataggtggatctcagaggatttttagggcaatgaaaatactctgtatgatactatatggtggatacaacatttgtcaaaacccatagaatatacaacaccaagagggacccctactgtaaactatggactttgggtgataatgatgtatcaatataagttcatctattgtaacaaatgtcccactctggtgatgcatgttgatattggggtaatgcatatgcaggggcaggaggtgggatatatgggaactctgtactttctggtcaatttctctgtgaacctaaagctgctctaaaaatggtcttttttttaaaaagtggtgaaaataattatattatctctatatagatattatatatattatctctatatagataacgtatatatatatataaaatcacagccaaaaaaaaatcctaagagattgttttcaaagctgtttaccatgtaaaccaaaaataaaattccaagccccccatccacctgaatggatgactctcttgtcaaaggcattcaaaaaacctgaaatactagttcaggccatgataggaatgggtggtcagaggtgtctcattatatattcctccccttgaaactcaggcacagctgaccagcattaacattagaacagaacccttaggctgacaaaacagaccatttttgcaataagataccaacatgacagttagcaggccctaaaataaatcaaagtattttaccccaaaatatatttctttgacatattttgaaatggccctgcaaagctgtctcctgtggggaaaatctacattctgtaaagaatgctgttccctttccaggtctttttcctgatccaggagagaattaagagtctggcacctttttaagtctgataagaaacatttacagtctattctctctgaagcctgctactggaggcttcacctacataataagaacctcggcctctacaacctcttatcataacccagaaactcccttctgttgattcctgtgtttagataaactttcaaccaattgccagtcaggaaatctttgaatccaccatatgagctggaagccaccccctccacccctgcctttccagaccaaaccaatgtacatcttacatgtaccgatggatgtcttatgactccctaaaatgcataaaaccaagctgcagcccaaccaccttgggcacatgttctcaggatctcctggggctgtgtcatgggcaatggtcacccatatttggctcagaataaatctcttaaaatattttacagagtttgactcttttcactggcaactttagtgagaataccttgattcatggtattctaccaaataattaaaaactatactttgtatttttgatagtattttagtttaagtataaccagaaagtcgaataaacaggacacaagaggggcgaaaaggctttgtctagcttggtcccctcagtgatttctcttccctgggaacctccgttgtggcacctttttttttttctcccaactgatggaaaactgtgtctctgcttatgacacttctaacactgaatgtgtggattttctaaccaagcagttttctcaattctctgtggacaccagctgggtgtcctacaatttaattcaattctgacactaactattcagttaacacagactccacaggttgatgtctcagtcccacaagactgtcccgagttcaaatgccaatctcaagtagtgagtccccaggtaatccacacttctgtgcaatttgactaggggttcacatgcaaattaagggttcacatgaccccttcctcagattcaataatttgctataacagctcatgtatttcagggaaacacttttgtttactggtttattaaaaaggatattgtaggctgggcatggtagctcatgtctgtaattccagcactttgggagtctgaggtgggtggattgcttgaggccaagagtttgagaccagcccatgcaacatggcaagaccctgtgtctacaaaaaaaaaaaaaatacacaaaaattagctgggcatggtgacatgtgtctgtagtcccagctacttgaaaggctgaggtaggaggattacctgagcctgaagaggttgaggctatagtgagccatgattgttccactgtaaagcctggacaacagagctagaccctgtctcaaaaaaaaaaaaaagggttgttgcgggggatggatattataaaggatacagatgaatagccagaagaagtacatggggcgaggtccagaagggtctgaagcatgagcgcttctgtccccatgtagttgaggcgtgtccccctcccagcaagtggatgcatttaacaatcttgaagctgtctgaaccccttcagtgagagtttttatggaggttcattatatagatgtgattgattaaatcattggccattggtgatctatattcagctcctctcccctccctggagattagggggtaggagtgagaattccaactttctagtcatgtagttggattctctggcaacaggggtcaatgaagaatccccccattagcgtaaacttaggtatggttgaaagggatttgttatgaataacaaacgatacttctgtcatccccatgactcaggaaattccaagagctttagaagctctgtgtcaggaaccatgggcagataccaaatatatatttcttcttatgttgcattcaccacttggtccatagagatactccctgttgaagtccccttgccctcccaggtggccctcccaaacaacacttaaatgtcttttgggcagcttcttttcccacgtggcccacatctgttctatgggaatttttcacatattctatcctttgccctgatggtgcccagtctactcccacaggcttgagctttctctggcctaagccaggcacagaagcttccctctccctcagctgcaggatctcaagctctctgaaaggtctctcactaagcatgagggcagaagaaggcatcttcctcacttgcccttcatgggcagagggtggggttcacagatctccacttctcctgatccttgtattattatattctcagaagtgttaagggggcttgtcatccaaaagaccaccaggatggctaaatagtagaaagaagagctttattagcaatagcagtttgcaaatcaggaagagagtctctggcatcgacccagggtattctccctttgaagtgggaaggtgcaggttggattttatgctccacagagttgtattacacaatagagtcatacacattcagaagtttgagagaaaagctatccatatttacaagaggagccaagtgcatatgcagtgggtaccatgtgtaacatacacactatgttcactttggggtggagtttcagcattaaaatgaggtggaatttggctctttaaatcaaagggcaaactataggacacaaagacagtttgtgtgtaacctctataacctggctgaaattggcttaaggtttgtagttgcttatcagagaaaaatgtttataaagccagccttctgttcagtcattgagtcgtagttttctgggttgtaaatcagagttaagagtggtcgaatagctcctattgttatggagtgtagcaagggtgtggtttttcttgtagccttaggaatttaggaagttgtcatgccagctgagccctgaaccctagacctgtaggtaacttttgtttccttaaccttagggtttgtcttagttgacaaaagggaatctattttggtctctcagatcacaggcctaagaggtaaaaaatcagttctgagtcattttttatgtcaattctacatatggtggcagtctcatacttacagatttccactggaactaaaacacttttcatgaagatgtgacttggtatggtgaagtgagctctggaccagtggtgaaatgacctgacttcttgtatttctaccattttttagtttgtgactttataaagaaattactttgttggggtgtagaaaacaattccccaaaatctagcttgttgacatgctgagtgctttgaaaatgaaaaggccttagaaataggcctcagaaccaaggttctgactttcctctgtctctctcatcctccttattttcccaagaagaagagggggagagattctgtctggaatttccttatctaagaaagtgtatttcacaaagaagtgcagttgttttaagagcacgctccctagaaatctcatcaaatatccaggaaaaatcaaccttcagagaaacagaagggattgggaatcgtcaccaagtcactatgcccagacagacttttcatctgttcttctgagtgcaattccaagaaattaactggggaaatttatttgcataataagacaacctttgttctgtgcagttctgtccaccccttaccttcccataacttgttccatccagctttcaaagacaatcatttacaaaataatatataccttacaggtccttatgtctctcctctgtgaagagagatttgaagcctcaatcatctggaccctctttgagtctcatactttgtatattgcttctgtgtttatgcaaattaaattttgtatgcctttttctcctactaaactgccttttgtcagcttatttttagcaaaccttcagtgggcacagaggaagccttccctctgccactacaacttaatctctttgatgatcactttccataaaatggttttgaagattgaatgagatagagcaaatgaagatgctttgaatgtatacatgtgctaaacacacggaaaatgctctgttgtgagttcaaagtactttctctgctattgaggcttctaatcagtatgattctgtgatgacagaaactcaaaagcttacctttttttttcttctgatactgaaaacttccatcttgtcaaaagacaaaattacaacaaatttagcttaaagatcttaactggcttttatttgtgattctagaatcaggcaactcctcattttacaaaatagaatgagtgttcccaatgaattgagcagaggttggtttaatagacagaaatggaccaagaaggcagaaacggaaaaccaaaaaaggctgggttgtttcaaggttacttttcttgcaaaggttaaagcagaggggacttcattatcatgccagctagcactggcttgtttggaaatttggctattatctctctcctgatatcatggaaggttagagaaataacttagtgttggcttggtggtgtggaacttcagcttgagtgaccccattttggcttggtatgtgttgggcttagtgcaggagctcagtccaaaccgatggcctcctataacggtcttaaggaattattatagttggagcgaaagtccagtcttctgtcccatttgcttactaagctatactaagggaaaaaaaatgggactaaatttaaatattgtttttaattttctgttggaacaaatgagtgattgctatataaaggtgcatttcaagtaccaaatgcaaaattatgctattgttgtgttcttcaagtgtgaactttagtggttacagctgaaactcgtagagatgtctcagattctgccttcaattggcttatttagctttgatggaaaaacactttatttcttagaaaagctataataactgttatcattattttaataatgacatttacacgagctttagcatgtacatgctttctgggcacttgtctaagtgttttccaaatgtggggagagaaaggaggtgatccctttgctcctcatcataaaggtcatggctgacactcctataaaaaaatgacaggttaacaagagaaaagcataatgatttattaatgtgtataagcatgggaaccataaaaaataggaaaactcaaagaagggccacatggttgatgctaaagtaccctcttcactgggttaagagaagtagaggtgtaggagtaattggtttttagggggaatgaatgagcacaaagaacaatgataaatcatagtcaggatgaagttcctgtgagctctgagggaggcagtgggaacacgaggggctgaacttcactgtgaacaaaagttgtcttattatgcagatagcatctcccaggtaatctctggagctgccctaacaatagatgagaagtctgtctggacatggtgatgactcctagtctcttcattgggattcctagaaacggggggtcttaaaataattgcatttctttgataaagaagctttcttggtcatataaaggaaattctagaaagggtctctcccaatgtgcttcagcaaaaaaagattaaagaaacagataggcaagtgaaggccagagagagaccttggggctgcttctttagttcagcatgtcaaaacaccgtattttgaggtattgctctctgggccctaataaatatatggtcttatctaatcctcacaacaatcctaggaggtaggtgacactatccccattttacatagaggaaactgaggcacagagaagttacagtttacccagaacagtcagggttgtttggagtattaacatgaaataatgtgtgtgactaaaagcttggtgtgtagtacagcagattctcagtcatttttaatttactctaagggtcaagagttagtaaatatagaagtccatgtgactttggggctttcattgggcaaaaccacaagttttggcggaaacagataaagataagcacttattcttatttggcatagatagttccttccttctgcatcctactgctattttcattttatcgatggaatactttgaagcacgaaaaatcattatatcttgaaataatttttaaaataatccaataacaaactcagaactactgaagaataataaaggtaagacaatacatattaaacattttaagggtaacatttttgggaaattgactttttttagctttatggaatattattatcattattatcatgatcattattatttccattctacataggaagaaattgaagcacagagaagttacaggttagccaggagaatacctattttccagaacttttgtggggtattaacagtacttaatatgtgttaatttacatactaacttaggtaacaagcgtgtgttaagaataagtatataaaatgtgtttttggattcaaattttattttaaatgtgatagatagaaatatttttgctaagatatataattatcctccaaattatttttaggatgagtatgaattttcatatgcaatgcagttccatcttatgtaagcgctgtattctaaaattagcttttaaatcaaatatagggtatagtaagaatcatcattaggaccactgagctcaatattgtatatatgatgttgtgtatacaactaacattccttctaactttttactggtcactgtttttcaatgggtctcaattggatttttttaaaatttcttctttcaggatgttaacaaagaagaatcaagtagctattatcagaattcagttttgttttctgtggaaatctctttccctaacaggttataacaatccagtggtgtgcttgtcaaatttcagcattacctttatgttgaacatttaaaaaaataataacagtagcctacattttaaatatacttagtatgaaatgggcattgtattaaattctttctgtgcattatcttatttaacatttaaccacaaagaggaatgcattctatctcttacacttcttcataaatgctttatgctttcacttgttaatttcacacatttttatttttaaaaatttggtatgtgttcttatttgcccagccgtatatctcctatttccttttgttttttctctttggtgcttttgttaatcacttgtttatagttttaaatattctcttttctcctcttggttttttcccaattatatgaagtctcctaagtctaattcagattctaccctttctataaatcctttacagatcactctaccctaaaaagacctctccctttgtgaaatctacatagcattcatttgacaattattcattaagctgcttatcttgaaattttatttaaatcttttgcttaattttcacaagtttgtcttcttttccaactttggtaagttcttcaattatgaaatatagcttaacactttgtttccctatagtagtagttctttaattctttaatgagtagcagattttcatatggccagaaaacgccactcccaattgaaaggatatattacagaatggaaaataatctgaactttgtaacctaagaagcaaaatagtctgaattctgcaacctaagaagcacaatgtgtaattgaaggcttgctaaaaaaacaaaaacaaaaacaaaaaacccagaaaaccttatcacaaaagccaacacaggttttgggaaattgaaaatataatattttcatggtattaagcttcatacgaaaatgaagtccagacagcaacaacatactcttgagagtcttatcctgagttagtctctataactgattagaccagaaggggaggagatggctcataaaaagatctgcttctaaaaggaaagtctgagagattttgctctagagtgttggttcatactgaacgaggaaaagaacactggaagttctaaaatgctgaaagaggtattcaagacctcatagtctttgaaaaacagcaaatagtagttcagttttgacttggaatcattcattcatttattcttgtaatcatttctgtatccttaaggaatgttaaatcaaagatgtagaagacatagtcctactctctaagcactttctttgtagcactggagataaaacacaaacaactagttactacgctgtggaaggcgtaatacatgttatatgaatattcttgaacgtgttacttagccttctgggatttagtttctttatctgtaaagagcaagcactggctttggtagaaaatctttaaggctgtttctacatgcaaaatcacgtaagtagtacattcacaagatcttgaaaagctttagaggagaaacacattccttatagtggagagatcaagggaagtttcttagtggaaatgatatttgaagagggccttgttaggttgttttgataggcatatactataatagtgataaaaccagttattgagtgtttgctgtgcagaaggcagtatgcgaggcactttaaatacagattcctaggcttggcgcagtggcttatgcctgtaatcccagcactttgagaggccgaggtgggcggatcacctgagatcgggaggttgagtccagcctgaccaacatggagaaaccctgtctctactgaaaatacaaaatcagccgggcgtggtggcgcatgcctctaattccagctacttgggaggatgaggcaggagaatcgcttgaactcgggaggtggaagttgcagtgggctgagatcgcaccattgcactccagcctgggcaacaagagcaaaactccatctcaaaaacaaacaaaaaacaaaaacaacaacaacaacaacaacaaaaaccccagattcctgtggggaagagggtggagcagagttctctctcaataccctgaagttatttgcacaattctgtgtatatgtaagttagtacatttttatggggaaagtttccgtggcttttctcagatgcttaaagtagtcataaccccagaaacaagaaccgcagtataaagagtaggagatatgattcctatattttgggaaatgcccatatgtagggggcgggggaggagggatagtggtgctggtggaaagaatgaacagttgataacaaagaagatgttaaaagctaagaattggaatcaaagcctcttggaggggagagcttgaagtagtgacacacagttaatgtggggtggctaacagattgtaactgggagtcagaatgtctggatttaaatctttgactggcatctcctacctgtgtaacctcaggcaatttgtttaacctctttgaggctaaggcttttgctatttagattaattgttacatatttactcaattctttttttttaattaagggtttactatgtgttaaatgccttcattcatatattctttgatacagtatgaatttgttgagaccctatacctagttactgggagaattttggtgaatgaagcagaagaattcattctcttgccctcactgaaacctatgaaagagacactattttgcagtggagggaactgaggcttggggaagttaagtaatttctcagtcttgtgataaagaaattgcagacccttcaaacatgggtctgactccaaaatctttttttttttttttttgatacaagatctccctctgtcacccaggctggggcataatcttggcttactgcagcctcaacctccagggctcaagtgatgctcccacctcagccttccaaatagttgggtctacaggcatgtgccattatgcctggctaattttttggatttttggtagagacgggatttcaccatgttgcccaggctagtcttgaactcctgagctcacgtgatcctcccgccttggcctcctaacgtgctaagattataggcatgagccaccactcgtcgcccaaagtcttaatcactagtgtttttgttttttttttaatcactagtgttttttacttcagaatactgtaggcatggctgactcttgtgaggttaacaagaagaaacttactttatttcaggagtaatttacatataaactcaaaggttgagagagggatgctgcagatattttggatagacttctaaatttatgaaactactaagtattattaaataatgcagtatttcaaatcagtttttcatatgatgacacaatcagatcactgagtagtcactacactgttattgaaattgcagttttcattgtgatctatattattcatattaaggaccctctaaaatgagtgcacttgcttttcaagtaagatagtttttttctcatatatttttcatgactgtctatttttccactcccataattttatctattttgcaaaagaaattgattacttttcatatttaagtcccttttgaggggctctctcttttgagggtggttgtccttgtgagagagttttccattaagttcccattgagaaaattagtgactatcatagctaagtattaatttacatacaaattgagttaaagaaaaccataatacaaagttttggatccgaactttagtttgttttctttataggtgcatttctgttagcatcatttaaactgactgcataatgcattaggttttactgagtgctggctattcttgtaagaatcctctgggattaaaaacaaaaattatctaagggaaacttctaaatattttaagtttatcccaatttagataatttatacactagttgacctgttccattaattgagttttcttcatactaaggacaacctttggttcttcttttttctcctcctccttctccccctcttcttcttctactgtttttttttttgagttggggtcttggtctgtcacccaggctggagttaaaggctcactgcacccttgaactcctggactcaagcaatcctcctgtctcagtttaccgaatagctaaagactgcacgtgcatgccaccatgcctagctaatgaaaaaaagattttttttttttaagagggagtcttgctatattgcccatgctggtcttgacctcctggcctcaagtgatcctcatgtcttggcctcccaaagcagtaggattataggcatgagctactgcacctggccattgttttgctttttaaaaaactttcaagaaatgattgggttgactctattgcctgagtcatagaattatttctaccatttctaagcaaaagcgtcttatcagatgaattggctcggcattttagttttatataaccaattgtcatatgtccaagaatttccatgatatttacaagacaaaatctttatttttatttgtttagaccttttaatgtaagaatatgtactcttattaccaagttatactgtactgactaggtcgatgttgcttgggacatcattgataataaatatttttgtaggaccccaaacaatacttaagtgacttctctattagtaaagcgtttagaatagatatcactccaagttataagaatctgtgattttgttaaagtttaatacgtttatcagagcaagcatcatgggaacatacttgtgcttttagcaaaacatgttgtggttatatatgtgcaagcttgagccagaagaggaaaatttttctgaatgatgttacaatgttgcagataaagattcaaaagatagattgttttgtagaaactgacaagctgattctaaaatttatatgaaaataaaagaacccagaatagccaaaacaactttgaaaaataacattgaggttggagaattaacattatctgatctcgagacttattatacaggttccacggtttgtgcctgtaatcctagccagcagagagactgcttgagcccaggagttcaggctgtacagtgctataattgtgcctgtgaataaccattgcacttcagcctgggcaacttagcaagaccctatctcttaaaatgagggcttataaagttacaataatcaataatatggcattggcataaagagacaaatagatcaatggaacaggatggattcaaaaaatggatctacacatatgtagacaatggattttagacaaaggtacaaaggcaattcagtggagaaatggtagtctttccaacaaaggttactggaaaaaaatagatatttacatgcaaaaaataaactttgattaataccttccaccatacacaaaaattaagttggctgtttccagctgctaacaactttcaggaatttgtcatgatgactgttctcatactgctagtaaagacatactggagattgggtaatttataaaagaaagaggcttaactgacttacagttccacatggctgaagaggcctcacactcatggtggaaggtgaatgaggagaaaagtcacatcttatatggcggcaggcaagagaacatgtgcaggggaactcccttttataaaaccatcagctcttgtgagacttattcactatcatgagaacagaataggaaagacccacctccatgattcaattacctcccactgggtccctcccatgacatgtgggaattatgggagctacaattcaagatgagatttgggtggggacacagccaaaccatatcattgacatttaaggagcttaccaaaaacacactaaagatctccttcaaatatttagatgaaataatgttggcggcaacttgtgtataaaattacatactcatagaaaaagttttttgtggttttttgagatattataatgtatccagcaatgcatattgtagctctgatattttctttaaaaattttttagttacgtatttatatacttagagttctgatacaactactacttaaatctcatttataaattttgttccttgtggccaagattctgtggggaaacagtattttcattttgtaaatcttagactttctattgtatttttttgtattgaaatctgattatttgaattttcatgacaaagtctcatcattttgcttttaattactctatagatttttatttggcagatcatcttatttttcattattaaaacaaggactgacatttgctgtctcagaattagtacattcaattattcttaaaaaacattggaataactccttattcagaaactctttttgatattttcagtttctaaacttagctgattatcaagaggaagcaaaaaagagccttgagtacccaactgatatcacaaagtctttgatgtaaatctcatgcattacagggtcccagccttattctggcctttccagccttattttaaactcagaccatgcatactgggttattggatttctcagtctagagtaaaatataaaaccacaagtgagaatgggaatatggcttaaaaacagatgtgttgcgaacagcaagaagtgacaactgtaaacttgatagcaagggaagagacacaaggggagaaaaaaagcataaaatagcacataaaacactttttaagtaaacaaagtaatctatagccccaaatcattgaaataataaaaagtgtttaaattttctatccaattggaattagatagaaattgagcatctactatacggtttcctacatccttataattaacttaccttgccctttcaacagcttttgacatcaattctttcttgaaatttactctatgtctttggcttatatgaaaaatattcctggttttccttctatctctttgtttactctttcaggctcccttgccaatgcattatcttctatctggcctttaaggttgcatctgcccaaggctcctttttggttgtcatttcatattcttcttttgacaatctcttccacacggtggcttcaattacaacctgaacattacaactctcacatgtatagttcctgggctaaactccagactcatttttaactgactgtttgaaactctacttggatatttcaaatgtatttcaagctcagcatgtcaaaagccatatttataatcattttttttcccttatccacaaacctcaagcctcctccaaggtttatttgttgattccttcagtcatctactcattcatttatttattcatcaattctacaaatatgcaactggtttagttactggaaatacagcaggggtaagacagataatgctcctgttctcatggtgcttatatgccagtggatgaagacagacaataaaaaacaaatacgaaaaacttcagacagtgaccatgtgcaccgaagaaaaaaactgggcaatgtaataggatgtgattaagagatgctacttactttgtccagtcagggaaacctctctaaagagatgatattttggatgaggaaatgacaggaaggagccacacatgcagagatcagagggacaaacattccagaagaggtgcagcttatagagaggccctgaggtaggaagggacttggtgctcttgagctgcagaagggaggccattgcaagcagagcgactgagtaggtaggatggaggtagtgatagagatggcactggaggcagatgggtggcagactgtatcggactttgtagagtaggccagggtgaggaatctggatttttctaaatgtactggaaaaccaataaaaggctttaaacaggggagaagcatgatgtgatgtatgttttaaggagatctttccagctactgggtggagaatggattcaatggagcaagagtggagtcagaaagaccagttaggctacttttatggtagtacaggttagaggtggagcaggcttagaagtagcatggccatagtggaggcagtgagacggtgtttggaagagagctgaggaaaggaagctttgaacaggtatattttgagatatctattagacatctgagtggaaatgtcagttaagcattagaattagatatagacaaatctggaattcaagggagaggtgaatgtctgagatgtgaatttagaggatatatatataaaattttaaggcaatgagattagatgagatcacttagagagagaggatagagatgaaaaagagggtaagaaggtctagaaacaagtctggtgtactccaatatttagaagtgtagaagagaagggaaggaacagtcagcaaagaaccatggagaaagagcaatcagtgaagatggagaacaatcagaagagtgtttcagggaagaggaggacaatcgtgtcagatgctgccaagacatagaataattataataattatatagtttgcaacttttggccaagtgctcagaatgcttctttcctgttttctgtatttggaatatagtttatcttttataaaaaaattttgtgggtacatagtaggtagatataccctaaagaaaggaaatgagtatattgaagagatatctgcactgccatgtttgttgtagcatggttcacaatagctaagatttggaatatagtttatctcttgattgtgttttacgtggaaataaactatgagtataaaatagagttgatttttgttatactctttgagctcctttggaaaaaaatatagaactaagttgagctatgtaggtatcaacagctgctggattctgattgttgttttggatacttgtggtagaatattctgtaaaagtcccccatctctgggtatttctgtaagtgctggccttggtcttgtccaccagcactattccagttacctggggccccttaaccttcacctcttggctaagccttatccaggctttagaagcagaagaaaactgtaaaggctattgttcagcagtaaatttcaagatggcattaatattaatctctcttgaccctgaatactgttcaactggcttcggctttgtatcttgacaaaacagctctgccttccattccatgactgaatttgcatcttggttttctgcctagtttgcatttggagttttgttttaatttcctactttgccttgagagtaccagagccctgatcttaaaccctggtctctgtctccggtctgatacctgcttggcaccagctttttgtcttttatgaaatcttggcaccctccacttactcccatctcaccctattgttcttaactctcctactgagacctctaacttttacccactgcaggactccctgaggttaattgttttcttctttagatttccttttttttttttttgattgctagactttccctgtttattttagcaatacagttgagttctgttttatatctgggtcctatgtaattaatatataactaaactaaaattctaggatcttgccttcaatttggaatgacttgatgggagcatttagaaattactatttttaattaacacataataattgtacatatttatggagtacagtatgatatttcagtatatatataccatgtgtaatgatcaaattagggtagtcagcatatccatcacttcagacatttagcatttcttagtgttgggaacattcaaaatcctctcatctagctatttgaaaatatacaatttattattcttaactgtagttccccttcagtgctacagaactctggaagttactactcctatctagctgtacttttgtatctgctccccaacctctccctatctcctttgcctcccaacacttctcagtctctagtaaccactattctactctctaattctatgagatcaacttttttagctttcatatgtgagtaagaacatggagtatttattggaagcattgttatatccaaagtattctgctttaaagaagaaagaaatctacagatttttttttttttttttttttgagacagagtctcactctgtcactcaggctggagtgcagtgacatgatctaggctcactgcaacctccacgtctcagattcaggtgattctcctgcctcagcctcctgagtagctgggataacaggcacctgctatcacacctggctaatttttgtatttttcatagagacagggtgtcaccaagttggccagtctggtctcgaactcctgacctcaggtgatccacccgcctcagcctcagtggtgggattataggcgtgagccaccgtgcccggcctacagatgttctttactctaaatataataggcattagggaaacacagaagagtaaaatgtatctctgcctttgaggaaatatgtttttaaatatagtcatacatagatgctttatacagccagtgaattcagcttgttgcactgaagacagtcccttatgtatatgacccctgtactctgttttcactggagccctgtgctcacaaaacattgctattaaaacatttcagaaataagaaaactccagttaaaattttgaggaaccttgattcttagaataaagatggacaagagatcattttttcctagtgctctataataattcctttctacttaaccttgattaattaagacatatacatatttttactcatggaaggggcatattggaaatatttaaattcttacagtcatgctgtgcttttcacagatgattggaacattgcccaggcataaatgcatctcatccttcccccaaacagtttgtcagttgtttaacctagcataatttgtttttcatgaccagtaaaaatgacagtgctaaaatgttttaaaaggaaataaaaataaaatagaattatagctctgattttttaaatattctccttttttccttcctaatcattctttgatatagtaatgtatcttaacctttgcttcaattgtaggctatttttaacattgtaaaaacagaaaataatcaaaactaggagttttattttgtgaaaatgaaaacagagaaattttattttgtgaaaatgaaataaatttcaataagacaggttatactgcgacaaaataaaatttcacggatgcgttatcacggtttcaatgcttatgtacacataaccttcatcctttgtatgactttgtggctaggagatttaatgcactgactactcacattgatgctgggctgaagcctcaagttgtttgaggaaaagaccatttcatgtgcccaactatgaagcatttagaatgaaaggaatactgagaacatgtcaagagagctcatgccactggaaattgtacctttctgtaagaaagaatgtatctcaaaactataagatgagattgtgtaaccttcagacatgttagttcaccatagtataaaaccgtggtaaactatggtatactatggtttaccatagtatactatagtagaagacacacatttagcagctattaaaagatccagctattgatcagctagtacaactcgttctatagagtttgacttagatgctagaatttccttcatccccaaactacaattatcatcatagagacaagaggacacagatctatgagtctctggagctaggtagaagacagattacaggtagccctttcctgaaaagccaggtcagcttgttttgctgaattttccatcctgtaggttgaattcttttccaggaggctctttggtttccgtagaaaaaagtactttgtggttcctgccctatcggttttccagataggctgggcaggtctgaaccccagtgatggacatagattagacccaaattgtcatccctgctgtgattactctgaggtcactcatttaggatcactttttgcatgcatgtgtgtgtttgtgtgtgtgtgtgtgtgtgtataatgcattttgtatttatacagtattatagtagtatataaactgtataatagtacttatacagtttaaccagtgagatggttaaatggttaacaagtaaaccacatagttaaccagtaaagatgtaaaatgacttcagacaaatatgatcaatctctacagtcccctgatgaatttcacaggttcccaccaccatcagttctacctattcatctcatccatgctcattgttctgcctctttcctgttcctatggatgccctggcatgtttgtttctttctttctggcctcctatttccctcccctcagacatcacttcagcatctgtgccttctcacttcccttatcctgggtgttaccatttcagcctatgagcatgccattaatttgccatctttacaaaattctctcttgacttcacatccctctgtagctgccctctcccttctctcctcttctttacaacaaaactccttaaaagaactgttggctgggcacagtggttcactcctataatcccagcactttcagaagccaaggtgggaacatcacttgaggccaagaggtcgagaccagcccaggcaacacagtgagacctcatcactacaaaaaataaataaaaattagccagatgtggtggcacactgcctgtagtcccagctactcaggaggctagggtgggaggatcacttgagcccaggaggttgaggctgccttaaacctcctcctgaaggatcctcaagttgccaaattctaagatccattcttagtcctcatgttactggacatgttggcagggtttgatggacgtctcctcttttcttggctttgttttccccttactgttttctcctaccttctaagtctccatctcctgacctctaaactttggaaaacccagggcctggtactctgacctcttccctgtctaactcttgcttagtgatctcatcacttacctgacttgaatgactaccaaatatatatctctcacttggacttctccatgaacaaaagatgcatatatctagccgtgaagatatttttgtacaaattagaaaaagctgccctttcctcaagcacatgactgccatcttctggaaatttttcagagtagagacacctatccaaagactgaatatgaatggtgtctccttcagctgtgtggtcctcaaccttagtagcagtgctttttctcaacttggatgggtgtgtcatggccatcacaagcttagtaggtcccaacccacatcccatcccatcccatcccttctcatcctcttcccttcagtctttttctatttcaaactttttctggtggcttaggtcaaaccctttgaagttatccttgatgcttctctttctctcatatcgcagcttaaatccatcagcaaattctgttgctttttctttcaaaatacattagaatttaaccactcatcaccaccccactgttgccaccctggtctaagcctcagcagctctccccgggatgatttcaatagtaagcttcctttcttgctcatcattgtctgtcctcaacacagcatccacagttgtttcaaacctaggtcacagcatgtttctactctaccccaaatccttcagatggtctgccatctcactcagcgaaaaatcaaagtccttaaaatggtccacgggccctccacatccaggcctgtccacagcactggccttgtttcccacctccctcccctccacaccgcccggtgctccagccacgtggacctggctgtccctcaacatgccgaacacacatctgctttaggcactctgcccggatgcccttccatacagcatggcctgctgccttcctttcttgagtcattgctcaaaggtcactttaccctgtcatggaagccttccttatctataccacataaccaagcaacccctttcccagagcatttgctatccccctgctattttattttctccatagcacttagcatcacacacacacatattgtttactcttttacctgattagaatttaagcttcgtgagcctagagacttattttccccccttaattatatcccaatttctaaaacagttcttggcaagtagagtgatctcaataaatattaatcaaataaataaatgaatacaggaatccttgaatctgtctgggggacactattctcaacaagacactgcaaattgaccaaggggttgacaaaataaataaaaatacacaaaggtttgagatggtcctgaacaattatcatctcttgattccaagataaaagtattttcaagagtttgagaactcatttaaatctaatttgaaaattgcattgattttacacccttccggaagggcatgtttcctgcagagaaagcaagtaggtgccatctagtggcaacaaaggagatccacatttgtgttaactggaatgtatcgattagcagtgattgaaaatgtagttcctgatccagaagcttatgaactctatgacagaacagttgtgatagccataagtcttgaagggtgcattttccatggaatatatggcattgaaaaaaacacagttccatttcttctaaattatttctaatttttccttttaatttttgcttgttttctgggatttgacttcttttgttcttttgtttttcgtattgttttgtcctctacttatctatatactcttacattcacatggtactggcctaggctttgaatgggtaataaaataaaggctctatcttctgggaatttatattctaataaagacagtgcctatgagggtaagtatagaagaacatgccttatcttgatgaactgatctcttcaggccagatttctgcagcctgttgaggctttactgttggatatacttccagcattagaggaatgagctttcgggagacttagcttgctgtttttcagaaagtggcacattatatggagaaactaagatagaaagagaaatactcatgtccatgcatgttgtcaggaaagacagaaattaaatccgtctctgattctcattctaacatccaaaaagctaggtcatttcaattctttggtaaattaaagtagaaactttttggtccactttgggagcttgtgacctttccagccagagtggctggggttggtactgggaaatctttgccaccagagggcctgagtggtgatgtgacaaagcaagataagggtgtgaggcccaggaaggagacaaacttagggtgctgacactcacattaatgcacacggccttttcacagctgagtagcaccagaggacaaaagttggactagtggaatatgacaagaaagcaggtttcataccaaacataaatattttccaatcagagctttttccaatgagatcaaagtttctgttacccaatagtggatgggtccgagcagagactggatgacaacctgccagatttgttgaacctatgaaggttctctgattctctggaagacctctttctccctgcacatgtaaaaatcctccctactgttcagtattcagtccataccccacttccttttttgggtaccacagcttaaaatcatcttttctatctctacctttcttatcattttaagagcaggttagcatttacattatgctacctgcattaatgttttttctcagtggtctaatccttagctttttgagttaatgctaacctgcttgaagacacggaccacatctgagctaagtgacaaatgattctgtattgttatcttttagcattgaaggtgtatgtaagactcttttatcctttccacacagtgttaaatctaacccttgttgatctacctgcagtaactaaagtgcccgtgggagatcagccacaatagctctcttgctattgaccttgccatttcatcttcaagagtgaatattaaatgtttatgatgggtaatggtagtaaagctaccaataattgccacatctggctttttttttttttttgagatggggtctcactttcttgcccaggctggagtgcagtggcatgatcacagctcactgcagcctcgacctcacaggctcttatctggcatttgggtccaagatgcttaggcatagtctaagtttagttgtacaattcttcattgagatattagataaactaaaatctttgtggagatttgtttctttgttagatttatactcatttaaaaaatctaatagtactgtactagcttttcttttaaattgtggtgttttttacatacctgatttctctcaaagtaggtacagaaattgataatacaccagcttgtaggatgttactgaaaatttaaaaacccagttttgttatttatgtagttattttagtgtttttccctctgctgagggatttttttaaaattttacattacaggtaaatatttgctttgatataatactctataacttttttccttgagaaattgtctttgtataagttgatgtggtattttcaatagtgtgtttttaagctaaaggattccatatattatttatttttaacaaattaaatgatttcccttaacttattttgccttctgaagatatatttatataacttggcattccatcctgatgaaatggtgatactgaagaggggaatgctaacagaactcagaggtatcccagatctaatgtctttaacaatcaggtgctgttgtttgctttatcatttggatagccaaaattttctttaaattatttaataggctagatggtttagggactggttttagtatttaattgcttatctgaaaattggcaaatttagcatctatagcatttgtactatgtttaatatttctaaagtattaattgtgattcttagtaactactgtgttctgtgggatgttcatgaaggaagaagagagaatattggatactttgacttataattaaagaaacttttataattatggcaaaaatgcatgaatttaagttgtgtcattttggttttatttttgtagaatatgccgagtttctacattgcaaaggaaagaaatttacagattttgatgaagttcgccttgagattgaagcagaaacagatcgcgtgactggaatgaataaaggcatttcctccatacccattaatttacgagtctattccccacacggtaagtaaaataataaaattccaaattcttctcctcaaacatttatactacattaattaacatacatcatttgtacagaagatacaaatagtgctgggtttctagggtatcctttggatactgcccattaatgttatggttcaaagagctcttaagacatttaaggagaggcagtaggagatgactttaataaaaacagaattgagttagtcatcaaattttttcttcatttttattataagcttttagaatttgagaagggtatatatgaaaacttccatttttcagtctttgctgaaatcttagaggtacatgttactatggttgcatcttcccctattggatgtcttgcagccatatatagtcctatttattttcttcctgagaaatcagctctgactttttcccccagactatcggtagaaacttataaattagataaccaatccataatgtgtgatgggaaataacctgtatgctgactaaatttttagtgggcaaattttcatttcttattccctacttagctctattgcttttaaaacagaatataaatgacataagctcaattatgacttcccaagggtacttggtgccaacattgtttatatggagaggttgggctagagtcatgttgtcactgactctgtttgtacagctgattcagtaaacccagggcaccacgaatggctaacagctttctactaggctaagtggttaactttctattaaaaaaaaaaaatgatactttttaaggaaagggcagtcttaccctgtgagtttttataccacttgaaggcaatgtataagactggcagatagcatatgcatttctcatttggtgttttaattataaccccctagttacagatatgacagctttctgagcaaactgttaggcatgcaaatcagtgcctttcaaattatgttaaagtgatcatttggcatagcacaatcatatcataaaaatagagaaaactagcaaaaccatttttattttatgctctttattctacacacatgggttggagttgttcagatacacaaagtagaaggctgagctaagtgacaaatgattctgtattgttatcttttagcattgaaggtgtatgtaagactcctttatcctttccacacagtgttaaatctaacccttattgatctacctggaataactaaagtgcctgtgggagatcagccaccagatatcgagtatcagatcagagaaatgattatgcagttcatcacgagggagaactgtctgattttagctgttactccagccaacactgatcttgcaaactcagatgcgctgaagctagctaaagaagttgatcctcaaggtgagtgtgtgactactaagatgagaaggaattaaagtgtcaggagttttggtatctttaaaggtaacataaattcttaagatttggtttcattataaataaattagccattattaatgttgttaaaccttttgtattttaaatagaaaattcagtatttaatattaaaaaataataaataattttagtaaagatttactaaaataatgaaatttatatagtcaaaatctatataaatctaagaataatgagatctaagaaaacaggcatttctaagcctcatgggctgcatattttaaaaagttggtaaaataaacttctggtacagcagaattcagacaatctactaattattatgagttacctgcatatgcttccagtgaaaaacctttgtgttttttactttgtcttgtttctttaaaataggaagctctaatgcatgtaagatattatttagcttataattatttgagaaaaaatgtacgtataagcagggatttatttggtattgtcatctcaatatccagaaaaggtcctttcttatgcgtatgtttaaactttttacttctctaagttgaataacgacagtttatcttcagagacctcagtgctggccttggtgtgtgtctgtttaaagtgattgtggaagggcattcaatgatgtgccctttcaatatggagatacatgttcttcagttctaggaatttttcttttttgataattaattgtcccaatttctttgttctttttatctgtagttcttattagcatgttagaactcctaaatgaatcctttatttcaatctttctcttctataatcatttctttgtctttttgttctactttctgcaagattttatcaactttatcttctgctcttctgattcattttagaggttccaaaagcatatttttactttgtgaatcttatttttattttttaaaatagcatcatgttcttgttttcataaatacaatatcttcctccaaggactttagtgagagctttttgaaggttttcttttgtaatctacattgtctgaatctattgttttctgattgtttgtttttgtctctgtctttgatgttagagacctttttcaaatgtttgtcgatcttttgccgcttgttcgtgcatgagagtggagcaccaaaaagctgatttatgtacatgacagggattcattgaccagtgggttttcccatggagtaactgtgctgagagttgaccattttgttaggagacttcctcaactgttaggttctatgagtattttctcctgagctggtctggtataagcctgatgtctagtgttcttggagccaagaattggtgggtcaggggatggagtgggaggaggatggttctcactattcagtgtgtacacttttaattaattcctctgctttcatgatggcattcctgaaattcttctggagtccagagtccctctggttcaacctcttttgaagcaagtcttcagtactctgctgaggttgaggaagggtagctatgtgggtgtgtcctctaggagccttcagccaattcttttattttcagctcttcctataccctagcattggttctccaattcttaggcctttccagaattctgcaatggtaactgtttttttcttcttggtttcctccaccatccctgaaactggggcttgtaacaagcaggtagaggctccagatgacaagtaaggaccatcaccaggactccctttacagcgtcagtggcttggaagagtcagattataaactgggactggaatctagttataaaaatggtgctgaaccattcctgtcttacagccttctttcccataggagattgagccatggttgtctgattgggacagagagagtcataccatcagtgaattctagtgagttcagcccagtcacattcctgaggagtccacacgtagtccacgtagaaaaaacaaactcagcttctcctactatattctcaaacacgcttctgactccagatgtgtggtgatttctccctactgcaaacaagcaattaattcttttctgcagcagacatcagctaggtatcctctgattaaattttattctgatactatttacctggaaatagcatcagatcacactgattgagggttcagtcccacaagatgacccccacttctgatgccagttacaagatccaggttgtttaccctgtgctctgactgactggctataaattggggtttctacaaccttcttcttgtgttctattaatttgctagaggggctcacaaaactcggagaaacagttctttgttataaagaatattacaagggatacagatgaagagatgcatagggcaatgtatgagaagcgatgtggagcttccatgttctctccgggcacaccatcctctagaaacctctgcatctccagctatccagaagctctccaaacccagcccattttggatttttatggaagcttcattatgtaggcatgattgattaaatcattagctattggtgatcaacttaaacttcagcccctcatccctcctaggaggtcatatctgttctttctagtgaccagtccacttgctgaagctatccaggagctgccagccacttaccaacccattagcctgcaaaaagatacttatcactttgaagattccaaggactttagtagttgtgtgctggggaatagggaagaagactaaaaatgcgtaccgcaatatgacaatccagatgaagcttcatggaggactgcaaatgataccattcagtccctgatttctctttcgtcctaccttggttcagcctctttgaaattgtttcttttttaagataaattcttttcaagggtgacaagatggctatagatatcctgtctcacatcctcacaacttccaatctagtagaagaaaagccattggagaatattttatttgtgtgtattatgaattttataataaatgtaaactaaaaaaattggccaactaataaatcttgtaaagtgatttcttaaaattggtttaacatattcatgctatattttacccctgttgtgcacatagggaatattaatgggcagtaactacatctcatttctcaggcttttcagaagaagattcatttatgacctaaaataaactcatgtgatcacagatcattaggtgagagcaatgaatgtttgtggagggagtcatcagtttgccagaaaggaatcaatatccacaaagtcattcccagtatattcgatgtgttgttatagcgtaaggaaaatatagcattgactgtcagtcaggagtatgtcattttatgccacaaatctactccagaaagttaaatgagattaaaaaaaaactatcataggcttggcttatttacaaactcatttttattaggtgccacttagaaattgtcatgtaaatgttcatgaacttacctaaaataaatctccttttttgtggatcattagaactgctgctccaccatttacagacctacttgcccccagtttttatatcctatatatggtggtcccaagaggagacttttgaaagttttggtaggagtcattactgatgagatagaatttatgtgtgctattttgccattctttttgtgtatgtcctatgtctttttgtttctctatttctctgctactatctccttttgtgttaaatatttattttctagtatataattttaattccttggtcatttattttacttttttgttattttcttagtggttgccataggattacaattaacatcttaatttatagcaatctagtttggatcaataccaacttaatttcaataatacacagcattttgctcctatatagctccactccctccccttcctatgtgctattattgtcatacaaatcacaacttttacattacatgcctatcaacacagaaatataattatagctttatatgattatcttttaaatcagatatgagaaaaaagagttacaaacaaaaatacatttatattgtctattatatttaactatgtagttaactttactggtgttcttcagtttttcctgggtatttgagttactgtccagtgtccttttttttctgcctgaaaggctctcattagtatttcttgtaggctatgtctgtcagtaagggattctcttggtttttgtttatcttggaatgtcttaatttctccttaaattttgaaggataatttttacttaaagtttttttcctttcatcaatttgagtatgtcatcccactaccatctgacctccatggtcaaaattcagctgtcaatctcattgaggatcctttgaacatgattttcttctctcctgctgctttcaagattcttttttttttttttttgtcttttggcagtttgattatgatatctgtaggtacagatcttgttgagtttatcctacttggagtttgttgaccttcttggatgtgtagattaatgctttttaagtcaaatttgataaattttcagccattatttcttcaactattctttcttcctctttctctcctcttctctttctgagaatcacattatgtgtatgttggtatgtatgttggtaagatgttttcaccaatctctgagactttgttcatgtttcttcattctttcttttgtctttcttttccttagactgggaggaacaatctcaattgatctgtcttcaagtttgctgattctttctgcctgttcagatctgctattaaatctctatagtgaatttttttatttcagttattttatctccagattttctatttggttcttttaaaaaaaaatttctgtctccttactgatattctgtatttggtgaaacattattctcatacattctttttgttctttagattattatttttttttagtttttaaaacatatttaaaatagatgatttaaagcctttgtctagtaatttcaatttctgggattgttcagggacagtttctattgactgtatattttcttttgggtgggccatactttctttgcatatcttaaaatttttttgttgaaaattagatatttaaataatgtgatgtggcagcactagaaaccagattcctctctcccttccagtttttgttgctgtttattgttgctgcaggtgctatttatttggttactaattttcatgaaccaattctgcaagtctatattctttgtcgtgtgtggccacttaagtctttgctcagcatttttttttagtggtcaggacagggatcttcttaaatactagagtcagtaaatcgctaaacatttaccaaagctctcaatgtgcattttggggtatggcttcaatgctcaggcagacagtttacaactctgccttaatcctaacttcctgcttatgcagagctcaaggtgagctagaggtgagaatttaggatcttctgaggtctttgctgtgtttgcacaaaaccccaaacatgcatgtggctttctagattctaggttgtacatatatacaaaattttcaatggcctttgtggccatctcattcccaagttttccttttaagttttttggttagttttttctttctttctttttttttttgccccaattgttattgctccctgagacctgtgatgttgaacaattgccactgattatttttgacaaattttttctggggaaagaggcttttcacactgaataagctctgagtcaggtcaagtaaagaaaagccctgtgaatgggggtttttagggaactgctagacaggttaaatagttacaattgtctgaaaattgtatttttgatgctctccaaccccattctgtcccctccaggggtttctagggttctgattttcatcatgactgtggtgtttttgttttcaaggctactgtagagatgagagggggatgggcatagggcaagttcaaacaccatacggcttgttgttcttactgaaatccaggtttttttttttttttttttttttttgagatggagtttttgctcttgctgcccaggctggagtgcaatggcacagtctcggctcactgcaacctctgcctcctgggttcaagtgattctcctgcctcatcctcccaagtagctgggattacaggcatgtgccaccacatccagctaattttttgcatttagtggagacagggtttcaccatgttgctcaggctggtcttgtactcctgacctcaagagatccacccacctcgacctcccaaagtgttgggattacaggtgtgagccactgtgcctagctagaaatccaggtgtttttttttttgaatatttactcctcagattgttgtaagcctttggttaatttccagagttctgaaacagttggctttaacaatttttgccagtgttctttcttactgcctttatggagaagtggccttttcagaggtccttattccagcattcccgtttatattcctcattctggtcctatacaactgtaataacaacaaacttttcatataacagtcatttgagttgggatggtgagggcaatctggttatgacatctgttaccctgttggtcttcaggaatgatttggttgactgtgcaagtggcctgttctcaccacttaatgtacatctttcctgatattttgcccttggctaagcaggatgacctatttagatagtagaggaccattcttcattctttatttatctgaattagaatcttatccaccaaggtacataattatcgtcttctgagaggtagtgtattttaggcagtagctactttgtactaaattaaatctttttgacaatagacaggcaattttcacctaaacgggatttgagtatattggaatatatgcttgggaagacagctcatcttgataagttaattataaattatttgcataataatattcagattgaaaacttctataaaataagtattattaaatgttgggatgtatttacatatattttatattaagtttcacatgaaattattctttcagtatatgtagaatgtcacaaatttgtggctagacaaagttcaagctcatcttttgcatcatttgtgaaaaatagttttactgagtagaagagggtttttagcataatttcaaggggaatggctatataatttgaaatgtcaaactcctagccatcagaattatatgatgttttgaatatatttttctctgtatagtggtctttacttttcaaagtgctcttacttttgctttagtttcaccagaatactagaggttggtatgggtgagatcctattttggggtaaggaagtttttctaggtaatatatacagtggttgaataacatacctgtaaacacaccatgtgcttatggtatagcccctcctctcctcctccagtactttttccacttcatcagaccattcctctgctaggtgccttattaaatgatgtagataaaaataaacacagggcttggaagcagatccatcacatcctgattgtgtgtccttgggcaagttatttaacttctttgaaccttattacttaatctctaaaatgaaatgaaattatcataacccttacctcaaaagtttgctataataattaagataaattattataaagataataattggctcggcatggtggctcacacctataattctaacactttgggaggccaaggtgggcagattgcttgagcccaggagttcaagaccagcctgggcaacatggtgaaaccccgtctgttcaaaaaatataaaaaaaattagtgggatgtggtggcgcatgcctgtagtcccacctacttgggagactaaagtgggaggattacctgagcccaggaggttgaggctgtggtgagctgtgatcacgctactgcactccagcctaggtgacagagtgagaccttgtctcaaaaaaaaaaagataacacttagtcgaaatagctaaccaaatgctagcagttattttcctcttgaaaataattaaaggaaactttaccaggctttgttattttatttgttgtatagaacttataaatttaataagcttttctttaaagcaatcagttatatttcataattcaaactactgcccacacccatatgatttaatgaggcttgataatactaaaaaatagaattgtaatagaattattttgaatattttagtaatgtgttatgcaataagcataatttcagattcatctgcaaatggctagattaactataggtgaaagaaggtcttaggtaggttggggctggggtgggatagaaggaggattatcctgagcttggcttgatttgcttcaggactatgctagctgctgctcatggatttagagtaaaggagcagactaagattcctagcacagtctcgccatagagagagcgttcagtgctttctcaaaggagcacttcctccagctattttgtttatttatttattggcaccccagatgggacaggaaccattcagctatttacagtcgtgctcatatacactaacaattcagtcactccctttgttagtttattaatttgttgcttaaaagacatttatcaggcatctgttgagccagcaaaatgctcctggtcagtagtgtaagttcaatgtgctgtatcacctggtagtacactagactagcaggtgctcagtacgtgtttctgattatcttcttgtttctccaccattctaaaaaataggctattggtttacatggcatcttgtgtgtgaagagtcacagaagtccctggatgatcagctttatgaaatgaacattttcatgttttaggggatgtgatttggcctgcagcatatattaattcaagtgaaatgagttgtgtaataacaccatgtgcatatgttataatccaaagtatgccagtcaggtggcatcaccccagttttctataggtggaattgagctagagaggtcatggaagttgatcactgtcaagcagctggtaagaggctgatgcatgataaaagtgcctgtctcagatgccaatagtgtaattctttccattatatcatctatctctgtctgttataagcactttattcagcgataatcatgaacacatgttagacttaaaaaatataaagaagccaaaatatgaaattttacaatactaaatatggtgaaacactgttaaagttacactgtggtttgctctaaacttctagatcaaatattgtgaatgcaggaaaaacaattggtttaggagttcacacttatgttactaaatgaatgcttcttgattacatccacaaagcactcagtgagcattgtcttcaattggtttaatgtaattttcacttttccatatcagtttttaatgtggctacattgctttaattaattttaaaagattattctagttgcttgttcatttatttaacaaataatgaatgctcacttactatgtgtcaagtaccattcttatcatcaggaatacagtggtgaagaagacaaaattcttggccttctagagcttgtattctaatgggggaaacagccagataacagaaaacccattagtataatgtcaggtgttatgaagaaaaataagtgctgcaaagaaaaatgaaacagaatacgggaagagagattgattgggaatgctgtcttagacagacggcctaaggaggcagcatttaagcagagaactgatgaagtgagggaataagccctgtgaccatctggaagaagagtgttccaggcaaaggggacagtaagcacaaaggaatgagagtggaactggcttgacatgttgaggaacagcaaggaggatgttgaggctggaactcagcagaaaagtgtggttggttctgcaatcagagaggtaggcagggcccagatcatgtggggttttgtagatcacaacagaggctttgtatttttttcaaagtgggctgagcagccagtggagggttttaagagtagagaggcaagatctgactgatgttttcatagtcagtgtggctgctgtgagaagaaaagactgaagacgggcatgaatgtaagcaaggagaccagttaggttattctatcagagaggtccagtagggggtgaggtgatgtgctttggaataagagaggaatggtactgagggaagaagttgtctgattcaaggtacactgtgaaagtagagctgatagactttactaatggtttgcttcatgtgtttgaaagaaagaagtcaaagatgactccaagggttttacccaaaggaacaggttaagtggttgtgtcatttactgagattaggaatattcagagaagaaaatattgtgggagatcaagagctctattttggatatgtaaaatctgagatgctcattaaacacctaagtggtggtattacatataagagactggatccagttcaagagcagagtttcaagctggagttatgaatcattgagttatcagtctatagtggtatacaggtttaaactgtgctcctcacccctccaagaaagatatatgtaaagcccaacagtctactctcccccatcccatacctgtgaatatttggaaataaggtctttgcagatgtttttaagttaagtatcttgagatgagataatcctggatttagggtagaccctaaaatccaataactgatatctttataagagaaaagagagagatttaagacagagagagacaagatagaaggccatgtgaagatggaggcagagattggagttatgttgccacagccaaagaatgctaggagtcaccagaagttggcagaggcaaggaagaaccctcctgtagaggctttggagggagtcagcatgacactaccgacagctggattttggatgtctggcttgcagaactgtgagacaacaaattcctgttgttttaagtcacttgtttgtggtaatttgttatgacagccctagggaattaattcaggtggtgtctacagctttgagactagttgaattgagattacttaggagatgagtgtaggtagaaaagagaagagggccagagacagagccccggggcactccagtattttagcagtggtgaataggagggaaaatagcagaggtgatgaagaagcggtagagaatcaagtgactgtggcattccagaggacaagagaaaaatggcttcaagaagggcaatgtaattggccatgccaaatgtggctgagagatagaggagggtgatgtggcaggtcaaccaggcctactgcttaggaatgtgaggaagcccagtaacagctagattgctcccaacctaaagacgtcaaagacagagcacccatatttctttgtccctctggcttgtcagttttccccagttctcacaggctgtattggacttcaaacttaaaatgctgctctctgaggagccaggaagatgctgagaagctgcatccattcagtcacttgtattcttagctcctgattcctttccatccactgctggaagattcagtagtaaacagaaagaaaacaaccttgaactcggtccaaatcatcctcacctccaatctttgtatcaaaactagacttttatgtttcacccaatggagataagggtggagaactgaccattggatctggcacttgaaggtcactggtgaccttgataagaagggtttggtaggaaagtctccttagagagggttcaaggaaaacttggctgtgaggaagtgaagacaggaattatagacagctcttcaaggcccactgtagagggaaacagaaaaatgaaacactaacaatagtagtgtaagatgaaaagaatgtttctgaaagatgggagatattataacttgtttgtgttttgatggaaatgatgtagaagagaaattaaattggtgatggaggatagagatgagataaatgcaggagaatgggataaaggcaggaaaaatgagtgagaaatgtccttgatttaggagaatgaggatgggatacagggcacctgtgagagtcctggccatagattgaagagaattggattatttttccattttaatcataggaaaggaagaggacatggagacagatgaagttagttgataaattgattagtggggagatagcttttgatcgtattgagtttatttatgatggctgaatatctgcctatcctggtaagttctaatgattgtataataaagacattatgtttacactgctgctcaaggtgcctagcagtgtcactgacatctgcttgttttatagatattgctataccctggctgaaccgttcacccttgagagacattcacatttcctgtatggaaagcagaggagttagtggtggtgttgattgattacttgatcatgagttcattacccatgaagactataactgtgccttttatcttctgagcacagcagtattttagcattacccatccagtttgtcatctacaatagagggctgttcaaaggcctcgctagggaggcaaatgtgtctggaaatccctttcacggtgatttatttcacagcaaatgaatttcatttctaaatctagcatgaccagaggtcttcctagagtataaaaccatcccaagaggaatgtgagacctctggctgggaaagagggcaccatcttctcttgagatgaaattcgtgaattgggccagaattaactactcagctggtggcagacttttaaattcatcttatgggggtgtgtccctacatacctccttcagcgtttgctttttgatatctccctcttaaatctggaaaatgttaaaaatccatgggtgatgtaaactgatattcattgacctttggcaacatttagcagatatccaatctgctgtctggtcatagagatggtggaggtgctgcttagttgagcagaagcttcaaacatccaggcattgtcaacactcagaatataaagaatatgtttataaactgcaaaaataaaaacaattcatggaggaaacctattttccaggtactatatctgtctctgcacctgttcttcaccccaattagatttccattttaccttaaaattctttgcttatttgaccaatttaacaaatgtaatagatgctaattaattgcattgagcgcccaaatgctacttgatatttattgaatcagttaatatgtatgaaaaaatcagattaaaaaatgacttcatatgtagcttatagaagccatgttttgacttcttcaggaatatgtttttgagctttttataatatggttgagacccataaactcaattataaaatagaaacaaagactaaacctgaagggtttggagtctttgaaaaatttgttttacaagttctatccaattcattgttcttttaaattgagaatttactatgcattgggcttgaacaagacaaacgctaagtcatgttataattcagcttgtttgcaaagagtagatcatttatctgcatgttgagaaatgggcttgcccaagtatagaggaacactttcattttaagctttaaaaaagtaaattgagtcttatttagatttgaaaatatgacaacaaacacattagctttataggcttaaaaaagctttttatgaaagtatatattctttgatatgctgatttaattgggaaaatgatatgattataaaatttactgtgaaaaaaaggaagaatatttttaggacttgaatgtgaatgtgtgagtgtaaaatttggatttttaaaaagtaagaacaaaagaaaaatgtgaaggcacaatgataaagtgaatgtgctgttaaaatagagcttgttattatcatcaatgtaaaaggcctcaacgtggatttctaatgcgttcattccttttttgccactgggggtcactgtaaagacgctgcttgaagaagttaaaaatttccctgatgctctttgtggagtttgaatgtagaaatttaatgtagaaaagaaacactgttcatgaaaaagacttaaaaaagtaagaagataataaatatattctctctttttctgaatttaattgccaattagtaacatgaatcttcatttttttcagaaattctctttatattaatatatggatgttgcattgctattcaaggtaaaagtgtttaataatgatgactttagtgttacagaataattgtgctcttatgtctttcttatttcaaagacattaaaacacaattaatagtttcctatgcaattacatcttactcctggattctgatgtgaccatgagtttctaacatttccattaatgtaatagctcttttaaaagttgttataaaaacatattctacaagccatccccagaatatataattaaactagattcatacagttattttgttggcagtgtaaataaaatatgacaatgaaaaaaagcgaaattcttctaaagttctgtaagaactccatttttcattgctgagttttaggatcttcccctccctcctctcctgccccctccccttcctctttttcctctatttcttccccctccccttcttgctctccaacatttcttgagtggctgccaggtaccttgaatacaagaaaaactatttttttccattgagataagagtgaagtaaggaagtgtacatgaggcctatatgtagatatctggagaggtatttgaataatttattgcctattgacatagattttttcactgtaagtggggagcaaggctatcagctgaggaagaactggggtgggggtgaggtaaggatgataagagagaagggggttgtgtaagacatttggggagaaatgtattttgaccagctgctgtggagaaatatggaaggagaaagtgggcagcactgggggactctattgaggccatagtgcatctgcaccaagcttagtggttgtgtaattcccaaaaccactcagcagctgggaggttgaagaggcaaatacttgggttgcttttagatcaggattttgcagggagggttgaatggaagataaaagtgggcaaaagagttgaggatattggcaaaataataattggaaagacagactgtgaaatacttggaagaaagtgaaataaaaaagaatctgtatgttttgaggaagatgaaatggtttcagggatgggcttctggacaagattgaagaatagcaatgtgttcctataaagagaagaaagaaaaatgggagaataggagtttgtggttaaagagatgtatattagagtttatgatttacagctggaacaagtccaggttataaatgtccaggatgtggtcatgggaggaaattgctaaaatggcctgcagttgaaaaattattgaatagaagcaggcaaggaactcaatagccagcggactggatacatcgtcctcatgcacattgctgctgcttggataatggcggaactaaggggagtgaggactaacatgatgatgctaaaaccttcaaaaaatgtgtgtgtgtgtttgtgttgaaaatgggtgttgtagacatttggtagaagacagcaacaagggggaatagaagctgctttacccagacgatgtcaggttccaaagcaatgttttaatgtgaaggtggaagatttgggtttggagaagcaccaaggagtaagaaaaattctttaatctctactcttttcctctaaccctgggctctgtggagcatgggagaatatacagtctctacctgaaaggcataaaaaagagaactcagtttaaataaaggcaaggaagtgagagctattgtttagacaagagtgtgagtgtgttggagtaatttggtgacaataaagatggttccagatggcacagtgaaaaggattggcaaataggcagcaagaggaggaagcaggcagcatgttggaatgaaagtacaagctgttctgctaaagtaacagagaaacattctgaagaaattttgctttaataagaatttgcattaataaaaccataaacatataaaaattacattttaaaacagtacagcccccagtggttaatagcaccactctggagccaaactgtctgatttgaatcatggctccaccatttactagttgtgtgaccttgaacaaatttcttaatttctctgtgtctcagtttcctcctctgtaaaatggaataataataataccttccttttaggactgttttgatattaaatgagttaatgtctgcaaagtacttagtacagtgtctggcacttgataaactatataaaagtgttacgtaaaaataatttgttaagttggttaaaaagcgagtttgtggctcatggatttcagacttataaaattatttttctatcaggaattgttataaaggctttaaaaaaccaatagttttagcagttttaggaagcatatagctgttaaacttaaatctcactcagcaatgttgaccattgcattacacttccttctttcccttttctcctagggctgccgacactatcactcgtctaaggctccttgcacattgatgggttataaaggtgataaccaagtatgatgcacaaagccagagccaccctttcaaaaagcagccgtgttacctacacaattgtgtgtgtgtgcgcactggttgttttttaaaaagccaattacaattacaattattaaaagaaaaacagaaaattacaattttcagtaacagtgcctgtagaggtctgtataatgaaaatcacgttcctatttagtaggtcccaacaaaaccaattgacttaatggaaacttttgctgtagtagaaattcctgatcatggaggacagatgaccagaggagcttggatttggtttgtgagtgaaggacaaaattgactgagaaagatctgatggtactaactgtttacaagttaaccagctggaaccagttaaaagagtttcctcctgttgctgataagaatcactggatggtgttctgagcccaggacattttgtggtcaatagtcactaatatgaggtatgtgttcaggattccaaatagattgctgagggttgtgtgtggagcttgattagttattacctgaaatgtaaactcccatgagaaagcaagactgggaaatacctcacagtcccaagtccacagcagtggtgggtgcctacagggcaggcaattatgaagtctttctatgctggcagtgagggaggtttcttgattaaatcctaattgtgctttctaggaggaacgctcttgtctgttgtctattattcttcctgtgttcaacttgtgaaagtttcttccttgtccattatcttctttgacatatctgaagaagaaatgggggattgtgaccttcttgagagattcacagctttcacagcctgccttcttcttgtaaaaacttggggtgatgaaagttgttttaagactcagaggctttttcaggccaggccttttgtttctttgtgaatttagttactttaaaaactcagtaagcttctctactatctgcttcttgttaattccatgtacaaataactgtacccaatgatttttcctagacacagatcttaaatctattttatttatttatttttcatgtggccaataccctccacccccttcttctgtctctttcaacttattgtggttaccttgaggctacctgagacagtaggcttgggtggggaagtatgcattctaagtgtaaagtttgatgagctttgacaaatgtcaacccatgtaccagaacattttcatcacccataaaatctcccttgtgtcacttgccagtcagtgtctattctagtatccaactcctggctccaagaaaccattgaactgttttctgtcactataaattagatttgtcttttctagagtttcatgtaaatggaatcatacactaagtactctttgtgcctggcttctgctcagcataatgtttttgagaatcattcatgctgctgcatgttttcagtagttcatttttttaaataggtgaattgtaactcattctgtgaatataccatattctgtcttccatttatctgttagtggatctttaggtcgtttctagttttgggctattgcaaataaagctgctgtaaatattaatgcacaagttttccatgttcatatgtttcatttcacttaggaaaatacctaagagaggaattgcacatattaaaaaaattttaaaaactactaagctgttctccaaaatggttgtacaatttttattcccaagagcaatatgagtgtttaattgctccacattctcaccaacacttggtgcttgttagttttattttcattgttttcattgttatgtctgtgaggcagcattgatgtgcatgtctctgagtgtcatcttagcggtgatgctgagcatcagttcacgtccttataggccgtttgtatatctgctttgtgaaatgtctgttcaaatcttttgcctattttaaattgagttgtgttcgtcttcttaggattaagtaatgagttaaaaatatttctgatacaaatctttcattatatatttctaatgctttctcatctatagtttattttctcatattctttaactgtatcttttgaagagcaaattttacttttgattatgcccaatttatcaagtttttatatggctcttttgattatgcccataatcacattagactttgcctaacccaagtttgcagagattttttcttttatgcttttatctagaaattttgtagttttaggttttaaaaaagtttaatttatttatttgagacagggtattgctctttacatatactggagtgcagtgatgcaatcatggctcactgcagcctcaacctcttgggctcaagcggttctcccatctcagagtcctgagtagctggccaggtgcatgccagcttcaatgtgtttttcatttgcatttccctgataattattgacgttgagcatttttttcatatatcagttagctatttgtacgtcttcttttgagaaacatctattcgggtcttttgcccattttaaagtcagatggtttgtttgtcagctattgagttgtttgagttccttgtatattctggatattaccatcttgtcagatgcacagtttgcaaattttttttttctattttgtaggttgtctctttctctgttgtttcctccggtatgcagaagttttttagtgtgatgtaatttcatttgtctgtttttgcttttgttgcctgtactttcttattcttatccaaaaaatctttatctagatcaatgtcacgaagagtttctcctctgttttcttcgagtagttttttataattttgggtatacatttaagtctttaatctatttggaattgatttttgcatatggtgagagatcagagtctaatttcatacttttggatgtggaaagctagttttttcagcaccatttattgaagagactgtctcttctccaatgtgtgttctttgtgccttcgtcaaaaatcagttggctgtgcgtggatttatttctgtgttctctattttgttccattggtctagttttagccttaaatttaggtctgcaatttttttttttttgtatatggtgtgaagtaagagtcaaagttcattatttttcatatggatatgtaattactccagtaccatcatttagtttgaatggactgtcctttctccatggaattacatgggcatcttttgtctgaaaccaattatgtatgtttacgtatgtgtatgtttatgcatatgttataggtttaatatatattaatatatataatatataatatataaatattaatatgtattatataatatatattaatatattatattatattactatataaataatattaatatattatattaaaatattaataaatatatcatattaaatattatattaattaaatattaataaatatattatattaatatatttatatattaaacctataacatatgcatatacttatttatatataacatgcatgtacttatttatatatacaatatatatttatatattatataatatattatatgtatttatatattatatatcatatattatatgtatttatatattatatatcatataatatatatatttatattatatatattatatgatatataatattatataatgtattaatatatattaaacctatatttataattctggactcactattttgtttcattggtgtctgtgtgtatctaaccctatgccaataatgtactatcttaattaccatagctttatagtaagctttgaaatcagatagtgtattttttatcattgttttttaaaataatagtttatctttttatttgaatttgtaatcagctagtcagtttctgcaaaaagcttactgggattttgcttggaattatgttacatctgtagcatgtactatccaatattctagcctttatccacatgtggctattaaggtttaaattaattaaattaaaatttaattaattaaaattaaaacttaataattggttcctcattcacactaccatatgtcaagtgttcaatagccacatatggtcaatgtcttggaaaagtcaatacagtacatttccattattgcagtaagttctgtcaaacagcactatcgtagaccgattaggagagaactgacttaacagtattggatgctccagtcaatgaacatctttttttttttcatttatttcagtagtctctgcagtatattatagatttcagtttacatattttgcatatattttattaaatgtataacggtagaagtactattattggatgatgtgttctatagatgtattttaggtcaagtttgttgatagtgttgtttaaatctcgtatacctcttgatttttttatttacttgttctttgaattactgagacaggaatgttatatccttaactatatttgtgaatttattcacttcttccttcagttctgttaacttttgcttaggtgctttttaaaaatgaaactttcaatctctgccttttaattgtagcatttagaccatttacattcaatgtaattatcaatatcagtttatttaagtctgaagttgtgcaatttttcctctacctatattataaatctttctatatacaaaacacatgctatgttttctgcatatgttttaaatgacacccggaaagcattgacactatttttgctttaggttatctttcaaagatgttaaaaatgagaaagaaatattctgcatttatccatacacttattatttgcaaaggtttttttaaatacctttgtgtagatttcagttaccaacttgtatttccttcagcttgaagaacttacaatttcttgtaggacaggtctctgacaacaaattatctcagcttttctttgtctaaaaaagttattgcctttatttttaaaatatattttcactggatattgaattttaggtgataatctttttttttttgttagcactttaaatatgtcttctaatgtcctcttgctttcatagtttctgatgagaagtctactgttattagtatctctttgtgtgtgtctctcttttttccctctctgctattatggctatttttttttttttttttttttttggtcactggtgtcagcaatttaattatggtgtgccttggtatgttttgtgtgtgtgtgtgtgtgtgtgtgtgtgtgtgtgtgtgtgtagctgatgttctttgagctttagaatctgtgagtttgtagttttcatcaattattttttcttttcattccttttatttactcatgttcgtgttttattttatatttttaagaattttgtgcgtatttgtaataactgtttaaatgtcatttgtgaattccattgcttctaggtaggattctattgacagatattttttccctgacgagaggtcatactttccttattcttcatgtatctagtggtttttggttgaatactggatattttgaattttatgggagtgctgaattctacaatattccttaaaaatgtgttggattttgttttagcagatagctatcttacttgaagatcaatttcatattttttgatgttcattttttcatttattaaagaataggtccatggtagagtttactgatatcaacctttctggtgtctctaataaatgcaacatattcaataagatctttccactgtagctggtgggaacttaaatgattcccatccctttgtgagctctgggaattatttggcttacagcttcctgaaagttcttttctcccctgccatgcatgtagaattactccttttgtaacctgtataccatgcatggatttaaaaaagacataatgggacccctatgaaaatttctggacctcctttttatctggcacactgtcctgcaaagtctagtaccttggtctccatgaactccatcgatgtctcctcaatttagcatgtccaatgtttaattgatggttatctccttggatttttcctccttgccttgtggcccagaaattacctccaagcagaaagtgagtaatgtctgaaaatgactgttttatatattgtatccagttttctagtagtttacagaagaaagatatgcctgaactctgttattctcttatattcagaaacagagatttccaaaccctgggtttaactgaaaattcttagtgaacctttgttgcttagagccttttcagtctcttcttctattgtttgtatcacaaaaacaggttagctttttcaaaaccaatagatccaaatttttagatgttctctaattcctttttatttccacttgcaaaatgataaatttctcatgtgaactcatatcattcttaaatactctgctttaagcatcaaggaacaatcaagacaaattgacattctgaccctttccaacagcttctcctttcaaatccaccttaaatgttatcacatgcagcaggtttacaaaatatgcaactactgcataacatgaatcttcatctttctaatttgcaacatttgtttccttaccatttaactttggtatgccagcttttcattatgtcagctctcttcttcacagtaccattgtttctgctaataacaccacaataagtagactcaaacatgtaatggtgcaaacaatagtcctaggtgaatgttcagggtgctgtggtatttcttctccatgatgttttgcagagatccagaatcctttcatcttgtcacccttagggacgtagggagttattatagttagattcagcaaagggaaggcaaagcagcatgcaggagcacatgtgggaagttatatggaccaactctaaaagtggcacatatcacatctcacattccactagctagaattcaatcacaggtataacctaagggagattgtaattcaattgtaagaaggatttgcaaatgtaacttagctgtgtgccaaagataagaagaaaatagattcaggtagacaaagagcagaaagatttaagtgtatgtggattcttttttttgttgtttcttcatgtctcagtttattttggagtgcaaattctcagagacccacttcacatctaaatttccttatttttgaggtaattcttctcttgcctctttcccttttctttttccctctctttttcatgtctcttttttctacaaatattaaatcttccaagtactttgctagaatctggactatgttggtaagcaaggtagagtccctgccagcggagtgacagtaatttttatgttttctattatttacctaatattttacctagcatcatatacagtaatattacctgatgatttttaaaataaaaactgggttattcagaattgttgaaagtaacaagaaactactactcagggaaaacttagagaaaaaaagacaaaactcttcctattcatcaccgtttgctttcagaattaaaatattccataatctttgccagacagaaagtaacaacattgatttcaaatcaccctccctgacaactcccatcaaaacccaaaacaaaaaaaaatgcattaactggaggacatctaatttcctaagtctgtttttaattttgctgtatacatttttatattaactctatattgatttttttcattgttgttgttccagtgtacgcagtgttccagattacttttctggcaactgctgatgtggtttgtggctatgtttcgtcccatttcttaattagatgaaatgacaccccacttataatttagttacataaaaatgggagaaatgtcagtgtttttataggaaaatcaccgtgctgacaacaaatctaggtaacatggtagaatggtatcatatatcttctctggattttgtatttcaattcttgggtgatcctaaaacaatgaataagcttattttaaaattaatttattcacttaataaatatttactgagttcttattctgtgtttggcagctctgtgaatagcttagaatatatatgtagttcctgtttttgaagagactatgccccggtagggaaaatcgaaatataagcaggctcctagtgttgtataagaactatgatttcagtgtacataggaagatttaagggcacaaagaaagggctctgagttatgcttgtgggatcctgattgaggacccattaatgaggtctgaaagaaattttgaaggataggtaggagttgaccaaaaaaataaagagaagggtatttggagctgatgggaatgggattataaaggtgaggggggcatgtgaagaagtaaaagtcattgggtttgactgaggcttagtattggagtaggttgaagatattgttgagaaatgaagctggtgagatcacaacttttacttattgaatgatttttatgtaccacatactttacaggtattatttaaattaatacactttattattttgagcagttttaagtactcagcaaaattaggcagcaagtacagagagttcccatataacctcatccccaccgtgtgcaacctcccctactatcagcattccacaccagagtggtatattgtaatcaattgtcccacagacacttgaacacacatgtttatagcagcacgatttgcaacggtgaaaatatggaaccagcctaaatgcccatcaatcgagtggataaagaaattgtggtataaatatatatgatggaatactgttcagccattaaaaggaacaaattaatgtcatttgcagcaacctggatggaactggagactgttattctaaatgaagtaactcaggaatgtagacataaaattttaatctatttgggtaaatacaaaggaggacaattactgaatcatatggtaataatatatttagttttgttagaaacttgcaaactgtcttccaaagtggctataccattttgcattccctccagccatgaatgagagttcctgttgctccacatcctcaccaaatttggtattgtcagttttgtggatcttagccattctaataggtgtgtagtggcatttcattgttgtttgaagttgcaatttcctaatgtaatatgatgttgaacatctttttcataggcttacttgtcatctgtttatcctctttggtaaggctgttcaggtatttttctcattttttaattgagttgtttcttgttgagttttaagagtatttttgtgtattttggataacagttctttataagatgtggggtttcttttgcaattgttttcttctagtctgtgacttgttttctcactttttaatttttttttctgagcagagcttttaagttttaataaagtccccttattgattatttctttcatggatcatgtctttggtgttgtgtctagaaagttattgctgtaccagggtgatgtaggtttttatcctatgttaacttttaggagtcttttcagctttgtgggtctattacccaccttgagttaatttttattaggagtgtgaggtttgtgtctatattcatcttttagcatgtaggtgtccagttttttcagcaaaattttttgaaaaaactctttgctccaccatattgcctttgtatctttgtcaaggatctgttgactgtatttatatgggtctgtttctgggctctattttattgttttacatgtctattctttcactagtactacactgtgttgattactgcagctttattgtaagtcttaaagtcagaggtgtcagtcctccagctttgttcttcttttatattgtgttggctatcctgggctctttgcttctccatacaaaacttagaatcagtttgttgatatccacaaaataactgactgggattttgattgagatttcattgaatctatagattaagttgggaagaactaatatctttgcaatattgagtctttctacttgttaacatgtaaatagctcttcatttatttagttcttctttaatatctttcatcagagttttgtagttttcctcatacggatcttgcatatattttgttaaatttatacttaaatatttcattttggggggttctaatgtaaatagtaatgtacttttaatttcaaattctgcttgtttattgctggtatataggaaaatgattgacttttatatattaaccttgtattctgtaaactctctataattgcttattagtttcaggagtgtttttgtcaatacttttggattttctatatacataattatgtcatctgtgagcaaagacacttttatttcttcctttacaatctataaagagttatttcattttcttttcttattgcattagctaggacttccagtatgatgctgaaaagcactggtgagagagaacatttttgcctttttcctgatgtcagtgggaaagctttgaggttttcaccattaagaatgatgttggatgggcacagtggctcatgcctgtaatcccagcactttgggaggccaaggtgggtggatcacctgaggtcaggagtttgagagcagcgtggccaacatggtgaaaccccatctctactaaaattacaaaaaaaaaaaaaaaattagccaggcatggtgctgggtgcctgtaatcccagctacttgggaggctgaggcaggagaatcacttgaactcaggatgcagaggttgcagtgagccaagattgtgccactgcactccagtctgggcaagagagtgagactccatctcaaaaaaaaaaaaagaaaaaaaaaagaatgatgttaactgtaggtgttttgtagatgtagatgttctttatcaagttgagaaagttaccctctatttctagtttgctgagatttaaaaaattatgaattggtattgaattttgtcaattttttctgcatctttttaagtttttctacatttattaataggatcatgtgattttttcccctgctttatcctattgatgtggtggattacattaattgattttcaaatgtttaactggcccagtatttctatacttgggataaatcccactacattgttggacttgacttactaacattttgttgaggattgttgaacctatattcataagagatattggtctgtagttttctttgaatgtctttatatggttttggtattagggtaatgctggttttatagaaagagttagtatttcctctgattctaacttctgggagagattgtggaaaattggtatgatttctttcttaaatatttggtagaattcatcagtgaacccatctgggcctggtgccttcttttttggaaggttattattaatttaatttatttgatgaatataagcctgttccaatcacctatttcttctggtgtgattttggaaaattgtgtctttcaagaaattggttcattttaaatttatttttaattaattattgaaaaaaaaccatcttaatctgtcacccaggctggagtgcagtgtttcaatcatagctcattgcagcctcaaactcctgggctcaagcaatcctctcacctcagcctcctgggaattggtccattgtatttaggttttcaaatttatgggtatacagttgttcataatattctcttattattcttttaccattcatgagacctgtagtcatgtcctttctttcatatctgacattagtaatttgcatgctctctctttttgattacttagtctggctagaggcttattgattttataaatcttttcaaaaaaacaggatttagttttattttctgctctagttcttattatttctttcatttccttactttggatttaatttgctcttctttttctagtattctaaggtagaagcttagattattaattttagatgtttctttttttctaatatcttattcaatattatacacttccttctaagcaatgcttttgttgcattccacaaatttggtaagttgtattttcatttagttcaaactgttttttaagtttctcataagattttttttacccatatgttatttagaagtgtataggttaatctccaaacattttgaggttttccagctatctttctgttattgatttctattttaatttcactgtgatctgataacagacattgtatgatttctgttcttttaaatttgttagggtgtgtttgttagtgtctatcttcgtgagtgtccatgaacttagtcaagttcatgtgaactagagaaaaatgtttattctcctgttggatgtagtagcctataaatgtccattatatccagttgattatgttgctttttagttcgactatgtccttccttacggattttctgcttgctggatctatccatttctgatagaggagtgttaaattctgtaactgtaatagtggatccatccgtttctttgcagttctttctgtttctcctcaggtatttttatgctctgctgttagattcatacatgttaagaattgttatgccttcttagagaaatgacctttttattattatataatgcccctcttttctcttaataactttccttgctattaaatctattctgtcggatgttaatatagccaatcccagtttcttttggttagtgttagcatagtatatctttcctcatctatttacttttaatctgtgtgtttttatatttaaagtgaattttttgtagataatatatagttgtatcttgttgtttgatccactctaacaatctctgtcttttaattggtgcatttagaccattgacattcaaggtgattactgacacagttgaattaatatctattatatttgttactacttctatttgttgcccttgttttctttccttgtttttgtatcccactctttttctgccatttgtgcctttagttgagcattttatgtgattccattttatcttctttcttagtatataagttgcacttttctaaaacttctaagtggttgctctagaatttgctatatacatttacaacaattcatgtctactttcaaataacactatacactccccgacttatgattatttaacttacaattttttgactttatgatggtgagaaagtgatagaaattcagtacacttcttgacttattatggtgtgatgtcccaattacaaccccattgtaaatacaggagcatctgtaccactttaagagtagtgcaagtacctgataataacaaaataattttaattctttcatcctgttccttgtattgtttctgtcaaatattttatttacatataagcatatgaataggaataaaatacattgttgctattattttgaacaaactgttatctgttagatcaattaaggattgttaccttacttattccttctctgattctcttgctttctttatgtagatctgagtttctgacttaatattattttccttttctctaaagaatttcttttaatgtttccttgtgaagtaattccactggcaacaaacttccccaatttttctttatttgagaaagtctattactccttcacttttccttccccttccttccctccctccctccttccttccctccctccttccttcgccccctcccttcctccctcccttcctccctcccttcctcctttcttccctcccttctttccttttttcttcctttcttcctttgttccttccttctttactttctctctctccttcttcctctctgtcctctcttttctttctctctttccttctctcttttcttctttatccttccttccttccttttcctttcttttttcttttcttttatttcatgagtactggtgcaccaggatctccttcacttttgaaagataattttgcagggtacagaattctaagttgatattttatttctcagcactttaaatacttccaccttttcttttgtgcatggtttgtgaggaaaattctgacataattcttatatttgcaatcctttacttctttcaagatttttatttttgctttttttttttgtattttaaatatactatgcctagttatagcttttggggggcatttatcccacttgctgtcggagcttcctgaacctgtggtttgatatctgatgttaatttggggggaattctcagtcattatttctttaaatatctgttcctttctctctctcttcttctgcatatgttaaaccttttgtagttgtctcaccattcttggatattctgttctgtttcccaccctaccccctagtattttttttttcttttcgattttagatgtttctattgaaatatgctcaagcttggtgattgtttcctcaactttttccagtccagtcaaatgaacccaatcaaaggcattcttcatttctattagtctttttgatctccagcatttctttttattctttcttagcatttccatatctctgcttatattgcccatctgtttttgtaggctgtatatcttatctactagaactcttaggatgttaatcacagtttgttttttttttattcccagtctgataactctaacattagagttagagttctgagtctggttctgatgcttgctctgtctcctcaaactgtggggtttttttcttcgccttttaatatgccttgtaattttttcttgataggcagactgggtgctatatgatgtactgggtacaaggcattgtggttactaagctatagtcatgtagtggtaagatgtggagcgagaggaagcatgctgtagtcctgtgattagatctcatgtcttttagtgagcctgtgcttctggactcacaagtctcacaagtgcttcttagttcctgccccacccctttaggtgggaccggatggctacagtggactagagttgtgtatttttcttcccctatatagaaggctagagcaagctggagttagacatgtcctttgccctaatctgttaggctctggaaaaccctcagtagtataggttctggttaaatgacttctcttaaggtcagaccttgataagaagaacagaatggaccccgcgcggtggctcacgcctgtaatcccagcactttgggaggctgaggcgggcatatcactaggtcaggagatggagactatactggctaacatggtgaaaccccatctctactaaaaatacaaaaaaaaattagccgggcatggtggcgggcgcctgtagttcccagctactcgggaggctgaggcaggagaatggtgtgaacccgggaggtggagcttgcagtgggccgagatcacgccactgcactccagcctgggcgacagtgtgagactccgtcaaaaaaaaaaaaaaaaaaaaaaagaacagaatgttgtgggatatttccagttgatcactttcctcctttccctaccagaagcataaggggatttttctctttaatttactgcgagaatttatttaatcctctgaaggcaaaactcaggtccctgaagctcatccactctgagccttcaagcgattcatggattacagtttaagttttcctgccccagcattgttttccatggaggtttctgctcttgggtgtctgctctgttgagttgtgattctctatattcacctgtctctccaaattttgggaacagctaattgtctgtgatttcacttcactgacagatctaagaagggttggtttttcagtttgttcagatttttacttgttgggatggaatgatttccaagctccctacatgccagataggagtcctgctatttaattttatctttcataaaggaagccttggctgggcacagtggctcatgcctgtaatctcaatactttgggaggccaaggcaggagaattgcttgaggccaggagttcaagaccagcctgggcaatatagcaaggtgctgtctctacaattttttttttttaattacccaagtatggtggtgcatgtttgtactcccagctcctcaggaggctgaggcaggagaatcgcttgagcctagtgagctatgactgagccattacactccagcctggcaacagagtgaaactctgtctctaaaaaaacaaaacaaaaccaaaacaacagcaaaataaaaaaggaagtcttttgagagttaaagggggttatttttaataattatcccaggacaaaaaacataaactgtaatgtatgattactgtattgatgcagttgcctactgatgaggaaactaatatttcagagctaataagaggtataggtgggatttgaacccaggcagtctgatccctgagtcagtgcacttatctctatattatgtcacactcacacttttggggtaccttgtgtagcttttcaaagtcttcactaggacctatcaatactcatcattgtggttgttctttcctgaagagacacataattaaaacacaatgtcacaatgatttattagctcttaatttattatttttaatttccttttattaggagggcaagaactgtgttaaattattctttagttattactgcatataacctcttctaaatctgcaagtttttctccttcctggaattctgtacttgccagagacatctagtcaaacttagttctgtaaacagtcttagatgatataacttagttggaaataacatagctaatcacttgtaaattttagctaagacttaggaggcagaaaaatttagtgattaaaaatggaattaggttgctggatttgaatgccagtttcatgccacacagtctgtgactcttaggtaagtgtgattttcctctccaagtctcactctcctcatctgtatgcttgagaagataatagtatctatctcttggtggttgttttgaatcctatatgagcctggcacataatcagggctctttattttagctggatctttaggtttctagtgaaatgctttcaaagcatgatgactttaaaatcctttctgacagtggtttttaagatctatcaatgtaggtattgagtctgccagcaggagttcattgattattttaagctgcctatttgtgtaacttaatatagataagaaaatggtcccctttgccattttggtatatcactaagtatagatctagcttccttttcagatataagggagtagtaaagaaaatacttctataatcaacttttatttttattagagctataaatatatatagctttcttaaaagaaaaagtcagtgcaaaaggcttttaatagaaacaatcagtcccttgcccacccctcctgactcttgattattgatttccagaggctaccacttacaattcttttagctattgattttgatagttacctccatatttctatgtaatctgtttatattactattttttatttttcttagttttagatactctcttttgacttctcactgtagagaaggaggatttagctgtcttatatccttctcctatacttatgtatactcacacactcacatatgcacttatcctcctacattctactaaaagaatcatattttgctgaataaatttttataatcctgaaaatgttattcatagctgagctatgtggtaaattttggttattctttcttccatgatattgtcttttttgaggttgataattatctctgtttggtttgtttgcatagttttctgtacatctatcactaacgtattcccaatctcccctacagaagtctcaatctctcagtactttaaaaacattctggattaggtagttttatgtttattttcttggtagaggaagaaatctcttcaggactctctgttctctcattcccatagatatcaattgctctcttggtctcatactgggatctataccatcctgaaaacttccttcttttcttggttgtattcctgcttcctggatctcatgtcttcctctttattagtttgctcccttgttttgtagaacacgttctttaacagcgttcttaaaaaggtgaaagggaggtaaaatattttgagatttgcaagtctggaaatatcttttcctactgtcacgtttattgaaaatttagaattctaggttagaaatgatttttccctcagaatttcaaaaacattgctctattgttttttagtttccagtttgctgctaggaagactgatgctatagtgattcccaatcctttctttgtgtcttttctttaacttctctggaaactttttagtatcttttatcagttcccagtattttgaaatattttactgatatgccattttgtgtgtatgtgcatgtgtgtgtgtgctcatttcctgtttggcacttgttgagtttgttcaatccataaattcctatcttttacttataggacattttcttgaataggatctctccaaccccaaactgtttctgtttgattttctctctttggaatgtcagttattcaaatatcgaatcttctgggccatttctctagttttaacaatgtggtttttttttttttccttgtttacttcttttttttttctttcattttctggaacaattccttgagtttttcttccaaccattttactaacattttaatttctgctctcctattttcagttattgagattttttgcctggtgtttctgtttatggccttctaattttgttccatgaatgcaataagttctcctttctctcagaatattagtaaaaatgatcaagttgtattctgtattttacattatctttttttccttcaggtttcatattacaatgtttatttgttttggtctctgagaatctttttggcttttccttctttcttttcttttctttttaaattttcacaaaagtttctattgtgaccaacaataaacattcaaaaaagtaataatatccattgattcaatatccttcagagaatagaaaccatgtaaaaaaactgttaattttataagaataggtaaattttggtatccatatctgacaatgccattacaagaagggaaatttacagaccgtgatcctttttgaactaaatttatatatcctattcaaaaatccagctatattttataaggaggttatataatgaccaaatgtggtttatgcaattaattcagtatgtactaattcctgaataaagagtaataatagtctcaggctggcaagctgaataggaacagctctggtgtgcagctgccagtgagatcaacgcagaaggcaggtgatttctgtaatccaactgaggtacctggctcgtctcactgggactggttagacagtgggtgcagcccatggagggcaagccaaagcaggatggggtgttgcctcacctgggaagcgcatggggttgggaaactccctgccctagcaaagagaagctgggagggactgtgcctagaggaagggtgcattccagctcagatactatgcttttcccacggtcttcacaacctacaggcaagagattcccttgggtgcctacaccaccagggcctggggtttcaagcacaaaactgggtggctgtttgggcagacaccgagctagctgcagcagttttttttcataccccagtggcacctgggacaccagctagacagaacaattcactcccctggaaagggggctgaagccagggagccaggtggtctagctcagcggatctcacacccacagagctcagcaagctaagatccactggcttgaaattctcactgccagcacagcagtctgaagttgacctgggacgcttgagctttgtttggggaggggcgtctgccattactgaggctggagtaggtggttttcccctcacagtgtaaacaaagccactgggaagttccaactgggtggagcccactgcagctcagcaaagccgctgtagccggattgcctctttagattcctcctctctgggcagggcatctctgaaagaaaggcagcagccccagtcagggccttatagataaaactcctatcttcctaggacagaccacctgggggaaggggcggctgtgggtgcagcttcagcagacttaaatgttcctgcctgccagctctgaagagagcagtggatctcttagcacagcattcgagctctgctaagggacagaatgtctccttaagtgggtccctgaccaccgtgcctcctgactgggagacacctcccagcaggggttgacagacacctcatacgggagagctccggctggcatcttgtgggtgcccctctgggacgaaacttccagaggaaggaacagacagcagtctttgctgttctgcagcctccgctggtgatacccaggcaaacaggatctggagtggacctccagcaaactccagcagacctgcagcagaggggcctgaccgttagaaggaaaactaacaaatcagaaaagaatagcatcaacgtcaacaaaaaggacatccacacagaaaccccatctgaagatcaccaacctcaaagaccaaaggtagataaatctatgaagatgaggagaaagcagtgcaaaaaggctgaaaattccaaaaaccagaatgtctcttctcctccaaaggatcacaactcctcgtcggaaagggaacaaaactggaaggagaatgagtttgatgaattgacagaaataggcttcacaaggtgggtaataacaaactcctctgagctaaaggaggatggtttaacccaatacaaggaagccaagaaccttgaaaaaattttagaggaattgctaactagagaaaccagtttagagaagaacataaatgacctgatggagctgaaaaacacagcacgagaacttcgtgaagcatacacaagtatcaatagccaaatcaatcaagcggaagaaaggatatcagagattgaagatcatcttaatgaaataaagcatgaagacaaaattagagaaaaaagaatgcaaaggaatgaacaaagcctccaagaaatatggggctatgtgaaaagaccaagcctgcatgtgattgtgtacctgaaagtgatgggaagaatggaaccaagttggaaaacacttttcaggatattatccaggagaacttccccaacctagcaagacaggccaacagtcaaattcaggaaatatagaaaacaccagaaagatactccttgagaagagcaaccccaagacacataaccgtcagactcaccaaagttgaaatgaaggaaaaaatgttaagggtagccagagagaaagatcgggttacacagaaaagaggcccatcagactaacagcagatctctctacagaaaccctacaagccagaagagagtgggggccaatattcaacatgctttttttttttttgagacagaatcttggtttgttacccaggctggagtgcagtggtgcaatgttggctcactgcaagctccgcctccgggttcatgccattctcctgcctcagcctcccaagtagctgggactacaggcacctgctaccacgcctggctaattttttgtatttttagtagagacagggtttcaccatgttagccaggatggtctcgatctcctgacctcgtgatccacccacctcagcctcccaaagtgctgggattacaggtgtgatcaacattcttaaagaaaagaattttcaacccagaaattcatatccagccaaactaagcttcataattgaaggagaaataaaatcctttacagacaagcaaatgctgagagattttgtcatcaccaggactgccttactcttaagagctcctgaagggagcactaaatatggaaaggaacaactgataccagccactgcaaaaacataccaaattgtaaagactattgacactatgaagaaactgcatcaaattacaggcaaaatagccagctagcatcataatgacaggatcaaattcacacataacaatattaaccttaaatgtaataaaagggttaaatcacccaattaaaaaacacagactgggctgggcacagtagctcacacctgtaatcccagcactttaggatgccgaggtgggtggatcacgaggtcaggagttcgagaccagcctggccaagatggtgaaaccctgttactaaaaaatacaaaaattagctgggcgtggtggcatgcgcacatagtcccagctactcaggaggctcaggcaggagaatcgctggaacccgggaggcagaggtggcagtgagctgagattgtgccactgcactacagcctgggtgacagagcaagactctgtctcaagaaacacacacacacacacacacacacacacacacagagagagagaaattggatacagagtcaggacccatccatgtgctgtattcaggagatccatcgtatgtgcaaagacacacatagactcaaaataaagggatggaaggatatttaccaaggaaatggaaagcaaaaaaaagcagagattgcaatcctagtctctgataaaacagactttaagccaacaaagatcaaaaaagacaaagaagggcattacataatggtaaagggatcaatgcaacaagaagagctaactatcctaaatatatatgcacccaatacaggagcatccagaattcataaagcaagttcctagagacctacaaagagacttggacttccacataataatagtgggatactttaacaccctactgccaatattaggtcaacgagacagaaaattaacaaggatattcaagacttgaattcagctctggaccaagaggacctaagacatctacagaactctccaccccaaatcaacagaatatacatttttctcagcaccacatcacacttactccaaaattgaccacataattggaagtaaaacactcctcagcaaatgcaaaagaatggaaatcgtaactaacagtctctctgaccacagtgcaatcaaattagaactcaggattaagaaactcacgaaaaccacacaacgtcatggaaactgaacaacctgctcctgaatgactactgggtaaataacaaaattaaggcagaaataaataagttctttgaaaccaatgagaataaagacacaacgtaccagaatctctggaacacagctaaagcagtgtttatagaggaagttatagcactaaatgcccacaggagaaagcatgaaagatctaaaatcgacaccctaacatcacgattaaaagaactagagaagcaagagcaaacaaattcaaaaactagcggaagagaagaaataactaggataagagcagaactgaaggagatagaaacacgaaaaccccttcaaaaaatcaatgaatccaggagctggttttttgagattaacaaaatagactgctagccagattaataaagaagaaaagagagaagaatcaaatagacaataaaaaatgataaaggggatatcaccactgatcccacagaaatacaaactaccatcagagaatactataaacacctctatgcaaataaactaggaaatctacaagaaatggaaaaattattagacacatacaccctcccaaaactaaaccaggaagaagttgaatccctgaatagaccaatagcaagtctgaaattgaggcagtaattaatagcctaccaaccaaaaaaaagcccaggaccagatagattcacagccaaattctaccagaggtacaaagaggagctggtagcattccttctgaaactattccaatcaatataaaaagagggactcctccctaactcattttatgaggccagcatcatcctgataccaaaacctggtggagacacaataaaaaaagaaaatttcaggccaatatccctgatgaacattgatgcaaaaatcctcaataaaatactggcaaatctaatacagcagcacatcaaacagcttatccaccacaattaagttggcttcatccctgggatgcaaggctggttcaacatatgcaaatcaataaacataatccatcacataaacagaaccaacgacaaaaaccacatgattatcccaatagatgcagaaaggcctacaaaattcaacatcccttcatgctaaaaactctcaataaactaggtattgatggaacgtatctcaaaataataagagctatttatgacaaacccacagccaatgtcatactgaatgggcaaaagctggaagaattccctttgaaaaccggtacaaaacaaggatgccttctctcaccactcctattcaacatagcattggaagttctggccaggtcaatcaggcaagagaaagaaataaagcgtatttaaataggaagagaggaagtgaaattatccctgtttgcagatgacatgattatatatttagaaaaccccatcgtctcagcctgaaatctccttaagctgataagcaacttcagcaaagtctcaggatacaaaatcaatgtgcaaaaatcacaagcattcctatacaccaataagagacaaacagagaaccaaatcatgcatgaactcccattcatgattgctacaaagagaataaaatacctaggaatccaacttacaaggcatgtgaaggacctcttcaaggagaactacaaactactgctcaaggaaataaaagaggatacaaataaatggaaaaacattccatgctcctggataggaagaatcaatatcatgaaaatggccatagtgtccaaagtaatttatagattcagtgctacctctatcaagctaccactgactttcttcaaagaattagaaaaaactactttaaatttcatatggaaaccaaaaagagcccatgtagccaagacaatcctaagcaaaaagaacaaagctggaggcctcatactacctgacttcaaattatactacaaggctacagtaaccaaaacagcatggtactggtaccaaaacagatatatagaccaatgaaacagaacagaggcctcagaaataacgccagacatctacaaccatctgatctttgacaaacctgacaaaaacaagcaagggggaaaggatttcctatttaataaatggtgttgggaaaactggctagccatatgcagaaaactgaaactggaccccttccttacaccttatacaaaaattaacccaagatggattaaagacttaaatgtaagacccaaaaccataaaaaccataaaagaaaacccaggcaataccattcaggacatgggcaaaaacttcatgactaaaacaccaaagcaatggcaataaaagccaaaattgacaaatgggatctaattaaactagagagcttcttcacagcaaaagaaactatcatcagagtgaacaggcaacctacagaataggagaaaatttttgcaatctacccatctgacaaagggctaatatccagaatctacaaagaacataaacaaatttacaagaaaaaaaacaaacaaccccatcaaaaagtgggcaaaggttatgaacagacacttctcgaatgaagacatttatgtagccaacaaacatatgaaaaaaagctcatcatcactggtcattagagaaatgcaaatcaaaaccacaatgagataccatctcatgccagttagaatggcgatcattaaagagtcaagacacaacagatgctggagaggatgtggagaaataggaatgctttgacactgttggtgggagtgtaaattagttcaaccattgcggaagacagtatgggaatccctcaaggatctagaaccagaaataccatttgatctagcaattccattactgggtatatacccaaagaaatataaattattctactataaagacacatgcatacatatgtttattgatgcactatttatagtagcaaagaattggaaccaacccaaatggccatcagtgatagactgctaaagaaaatatggtacatacacaccatggaatactatgtagccataaaaaggaatgagttcgtgtcctttgcagggacatgaatgaagctggaagccattattctcagcaaactaatacaggacagaaaagcaaacaccacatgttctcactcataagtgggagttgaacaatgagaacacatggacacagggaggggaacaacacacactggggccagtcaggatgttggggatgagaggagggagagcattaggacaaatagctaatgcattgggaggcttaaaacctagatgatgggttgataggtgcagcaaaccaccacggcactcgtatacctatgtaacagatctacacattctgcacttgtatcctggaacttaaagtaaaataaaacataaagcaatataaattactaggcaaatactgtccatttcatctaatgaagaaaacaaatgacaaatatcatgtatatgacgtgctacacaaaatgtctaggttcttacattatttattactggaagaaaccttggagatcatggtttctaactctttatttgacagatgaggaaaactgagacctggggagttttggtgacttgctttgagactagaatccaagctttgtaattcctagtacagtcttctttccattaaatcatatttccttttctaaggaatagtgaatgctgtgtggcttacaagtttatttttggtgatggcactttacctgcttttcttcttttaatttttttgacctcagtgactagaactggatcaatagtaatccttggtttatgacgcactctcatcattggtccatgcataacctatttatttgtttatttgcttttaataatgtaatacataaaaatttcaaatattcatattaggtggagaacttaggagcaaaatgaaaatgtataatttccatatatgcgtggtacaaaaataaactcttatatttcaaaattatttttgtgctatagctatttgtttttctcccttgggttgaaggttatcttctggatgggtggtttggcaactgtcctcctcatcacactgaaatcaccaaactcaagtagcacttagaaaacaaagtaagacagaaggaaatgggaaaaggaccaggaaaatgtgctttacatttagcattgtgacatatatgtctaaaatttgttagtcttctgcaaattgtgtaatgttgggtttgtttatgatgcaggtctgagaaccattggagttatcaccaaactggaccttatggatgaaggaacggatgccagggatgttctagagaacaaactgttgcctcttcgcaggggtaatgtactgtggtctatacaagactttttttttttttttttttttttttttttgttatatggaagagaaatgattgggaagccactaggaggtttggttttaatgccttctcagttgtaaggaatggatttattattagttatacttttctggaatggctgtatgttcccaaatgatatactagaaaataatccaaagggagaactattccttaaaataacaggaataagaaaacaggaaaaggaaggagtttgaagggaggttataaatattcatcataggctacataaacttatactattgtaagcctggtatttacttgcctgctatatgacaaaactgctaagatacacactctcttaaaatgtacacagtttgagggtgagaggcattattgtactgatgctaaaaaattatcgtgggctcaatcagcagcctgtattcaatactgatgtttcccattgagttttataaaggaactcagtcttcaggcctaaaactagttttgcctttcttactctgcctatgtgagagccttgaaatctccctagaataagccacaaaaagtgtccccaactccatagatttgtgttttgtttcaggttacgtgggggtggtaaacagaagccagaaggacatagatgggaagaaggacataaaggcagccatgctggcagagaggaagtttttcctttcccacccggcttacagacatatcgctgaccgaatgggaaccccacacctgcagaaggtccttaatcaggtaaaaatgttctttcaagcaacaagaacaattatgaaatatgtaagtaggtgctggaattcatatttattatttttaagtttatttttttttccaaaacaagacatgcagcttcaatgatagggattttaaaaatgaatattagtacctcagattcacactattaccgttctcagtgaatagaactcaccttcctattattgcaagaacaattatcaaagcagaaacacatacctatttaggaacagtgaacagggatatacattttagcatatactcacttgtaatatgtagttatcttgagaagttaaatttttatagctttgaaaagttgatctcttgggatctgtttttgaagcaccagtctgtaatggctaggttacactttctgttaaattatttttatggctttgtttagaattgatttgtttcttaatttaaaatcttcagaatcacaaatcctaattaaataatcattgatttccactcatctaagatgcttttctagataaccccttttcccacaataatttagaattgggccttctgcctaccccgctccatgcactatgcacacacttcttccgtaaatcctcaatgctcttacttggttacagatattccttcccctattggagttaagtgttacgacaagcatcattgtcattgaatgcagggcctcctccctgagttttgattatattgacttaatgtgatcagcagcctttctcacaaatattcttgtaagttatgctttaactgttacatacaaacttaatcaggcaatcaatcaatcaagtagatttctgattcttagctcctggaaagtatcaatagctgtcacaatatgtgacattatacctgaaccatttaggcaaaacaactgagaagaaattttagaaaataaaaaattatgttataattccattttaagaggtacaatacagactattgtaaagtttatactttttaattaaagataaacatttggacactaggaaacatcactatgattgtatcatttaaaaatatgaatatatttttgagaaggagcattgttatgcaagaatgctaacactctaccaatatattttgcactgtcaaaactctctttagaatactgctttaacagctgtatttgcctacaaaaaatacaaataaactgaaaaaatctcagaggaaactcactaatatgattagaaagataaagctggaaatgagttaggttttgaatactggaaaaacaaaaggaggtggttgactattaggttattacaggtgacccccaagttatgacacaattggattctcgttgactaaaaattgaatgattttttttttaactgaagatttctcctttcctggataatcactctctctttattgcttcaataatatttatactatgtttgaaactaagataattctatggctatgtatgtgtaccaatacttctgctcctgtgggataatttatatggaaaatgctggaaaatgacatgacgtttttgaaaaattgaatgaaattttcactgtcgggggaaggcagagaaagaggtagtgagttgtattagatgatattggagatgtaggcagtggctgaatcctgtaatgtttctagaccaaattgaggattttggctcttacctaagaccaatgaggagtcatttaaaggtcctgagtagaggaacaacaagatcagatccgtgagtgaaaaaagaatgtggtattgacaagaagaccaagagtagaccagttagaagtaaaaatgagaaattatgggaatttggttgtggtaagggccagtggagagtaaaaaaaggggcgggtttgagaaatgttcaggaaaattgaggactaggtggtagattagagctgttgggtaatgggagaggtagagtcaaggttacgtctcaggtttccagattcttatgaagtcaccaagatggggaaccctgaagggaagatcaaatacttgattttggacatgttgagcttgagatatcattgacacatccaagaggagaagtcaatcaactggtcaaatatgcatgccacagcaaagataaatcttgtttggagacaacatcttacagctataggtatttggatgtttattgaagccaggatggaatgagattcccttaagagagaacagagagtaaataaaaaagaggccttggacccagatttgaggaatttcaataattactcttctggcaaagagggtgaattgtccaaggaaatagagaagatacatccagaatggatagcagaaaaatgagaggagctggaattatggaagccaggggaagaagtgttttagaaagccgcagtattgctttgctctggagatgtctgagaagcaaaaggtggaaatcaggtatttttattatttaccagttcacatggcaatcagttggttgctggtttcttgtggttgctggttctgttagatttgggtccttgtctcttgtgacgttgctgtcgggaatgctgtcctctcagctcttttgttgcctgcttcatagttagaacagcaacgcatgccagggtgctaacaataatttattactgcaagcaagggggtaatacagttataaactattgacaaataactctagatttatttaataaatatattcagctaacctcagataaacataaagatgacttaaaatagtttcttcagtcaatctggatatgttaattctccttactttttttttctttttttattttattttagtattattatactttaagttttagggtacatgtgcacaatctgcaggttagttacatatgtatacatgtgccatgctggtgtgctgcacccattaactcgtcatttagcattaggtatatctcctaaagctatccctcccccctccccccaccccacaacagtccccagagtgtgatattccaattcctgtgtccatgtgttctcattgttcaattcccacctatgagtgagaacatgcggtgtttggttttttgttcttgcgatagtttactgagaatgatgatttccaatttcatccatgtccctacaaaggacatgaactcatcattttttatggctgcatagtattccatggtgtatacgctacctgacttcaaactatactacaaggctacagtaaccaaaacagcatggtactggtaccaaaacagagatatagatcaatggaacagaacagagccctcagaaataacgccgcatatctacaactgtctgatctttgacaaacctgagaaaaacaagcaatggggaaaggattccctatttaataaatggtgctgggaaaactggctagccataggtagaaagctgaaactggatcccttccttacaccttatacaaaaattaattcaagatggattaaagacttaaacgttagacctaaaaccataaaaaccctagaagaaaacctagacattaccattcaggacataggcatgggcaaggacttcatgtctaaaacaccaaaagcaatggcaacaaaagccaaaattgacaaatgggatctaattaaactaaagagcttctgcacagcaaaagaaactagcatcagagtgaacaggcaacctacaaaatgggagaaaattttcgcaacctactcatctgacaaagggctaatatccagaatctacaatgaactcaaacaaatttacaagaaaaaaacaactccatcaaaaagtgggcaaaggacatgaacagacacttctcaaaagaagagatttatgcagccaaaaaacatgaaaaaatgctcaccatcactggccatcagagaaatgcaaatcaaaaccacaatgagataccatctcacaccagttagaatggcaatcattaaaaagtcaggaaacaacaggtgctgcagaggatgtggagaaataggaacacttttacactgttggtgggactgtaaactagttcaacccttgtggaagtcagtgtcttgattcctcagggatctagaactagaaataccatttgacccagccatcccattactgggtatatacccaaaggactataaatcatgctgctataaatacatatgcacacgtatgtttattgcagcactattcacaatagcaaagacttggaaccaacccaaatgtccaacaatgatagactggattaacaaattctccttaattttaatattttttcttttttctgcatttctaggaagtttatattcttttcattgatttcaagttcatcacttaggaagttcaagattatctgttttttcttttaattcagacttttctttaactgcattgtaatagaaaggctgtaagacctaaacaatctgggtttttatctcacctttgttcttaattaatcatgcactcttaggttcttggaaaagttttcattgtactgagcttgaggtgcctgctgatctcagtggaaatgccaagtagatggttatgtcaagccttcaatagcagagagagctttcccttactcagtcatggagttgcactgggatctagagatggaagtatgagtaagtttctgcctcagctgaagaatgtggagaaaattaacagctgacaggtgcctctagcaccttggctacctgagcttcatcagtgtggtaaaccacttagtcctgagaacaccgggtagcagctgtgactcctagcttccttcatttctatcacattctaacttaaggttcctttctacaaggtaggagacctggtaaatcaatccatgctaaggtgttattgggcagcctcattagtaacattagctgcattttaacagggtcttcctggatttaaagagatagctcaagtgagtgactctaaatgaaggaattttgagcatctctgaagggcagtggaggagggagttggtgttccttctccctatctacataatagtcaatgtcaaatgcagacataatgtttgaaattttgaattattagaaaaacaatggaggcggatctttgtctcatgagttaatctttaatctgtgtatatgattcaatcttcaatctgtgtgtatcattttgttttgtttagcaacttaccaaccacattcgggataccctaccaaacttcaggaacaaactacagggacagttgctctccatagaacatgaagtagaagcctacaaaaatttcaaaccagaagacccaacaaggaagaccaaagcattgctgcagtaggtcacctttcccttccttggctcagcattttaatctaatttctttagttttctattgccttagtctatttgtcacgttgcttcttaggtagcaagtaaactatatgaggctatctatatgatacaagataactcttgaatttttatgctttgttgaacaagaattattggtattattctgttattatcaacttaccagttgagcatcctcatgcccatttaaattgtgtttttaaaactggattaagtgagtaaaaccattagggatgacccagcaggaatttttgtcccttgtcttagaagtgggtaaatacagatgcaaatatcatttgtatttttcagctgtttctatggatgtcaattgtacttattatcctttattccaattatttcatgtaacttatttgtgtgcatttttcagtggaatgagaaccaagggtttaatttaaaagttctaacaataaggctgtagtttttttttttccttttacataatgattttaatgtagtcctttgaaaatgtaaatgtgaaactgccaagcatcttttcaccccttcatgatcttcccatcttatctttgggttactagagttattcctgtggtgtcttggggtaggatagcagagaattgttagagaattcctagctctttatatcttacactttcttctctccttcaaatccttctgtctccatcagttcctttatcctgtgctgccacttgtgtcaagtccctctcaacaggaaggctcccctgcccagcacacactgcaggatacccaaggtctacctccgaagatgatgtttggcacctcttatggcgcacttttctccccagcagcgtggcaatcaaagcatccttcaattggcattcaaagtgcacactataatttctttctttgtgaggagattcccaaatgctcaaatatttaaatataatattaattgcttcatcctatatttcctcattaaaaatattatacaaaggaaagagttttttttttttcagatataactctttcctaatttattctttcttttcgttcttgggttttgttgagctcttgcaaaaactcttcaagttacagagaaagctatttctgtttaggccctaggtcattatcttaatatccaactaaaactattctgcttgcaaataccgggtcttgcctctgtgactttattggactcagattacagaacttttcacagctagattcttgatttgcagagggctgattcagctccttctttatggccctattctttctgacctatttcttttctctcttctatccttccctcctgccttcctttctctgttcttcctccttcctctaatctcttcatgcactcagtgtctggttctgtgaaatgaatgataataagattcttgccctcaagaagtcccagtagagtagggaaaaacagacataaaaattaacacaatttaacacaattaattgtgttaaagctaataaatgctatgtttctgtaagtgtaaaatattaagggagcccggatgaggaagcagttacatgtgaggaaggatgtgaatttgcagagaaaacagagggcctgtggtaggagaggaccttgtcatgtggaaggaggagggcaagagaatcatgagaactttggtaacatttgttctcggattagtaaatgggccaggtggctgaggtatagggtttaagggaaggagcagctagaagtacactttctgaaaaatttttcatgtttcagtgtgtatgtcatacctctccaggtgtttttaaaaaataaaattagcatatacatgaacataactaaatccaattacagtctagcttctttggcctaaataatttgcagctacttttcattcatccatgattttgatggaagggaatgaaaagatacaagttttagatagtttgaattttttcccttttagattttgaatttgaaagtagttccagtatgtttaaattggagtttctaaacctggtaatcacaaatgaaaatagttggtttttttttttcgtgtttctttctttctttctttcaagcagccagtgtaaggtaattcattctttcctgggacaaatatttattaaatctcccaattatgttgagcagggaaaggtaaagaaaacacacattccttgcccttaggagagtgactaatagacatggcaatgttaatgtactgtgccaaatgctctgcaggaaacacgctgaagatgcagaggaggggcgatgaggagtggtgccggatagagtcatggatcatgaaaagtttctgggaagaaccaatgcttgagctgagtcttaaagaacacgtaaaaattagtcaggcaaagcagcaagggacagagagaatggtgttctgagcagaaagaaaagtgtaaaagcacagggacatggtgcatttggggaactgcaatggcttccttatggttggctggaaggtgagttggatgagtggtaagagatggggctgaagaggcagccaaagccagaccataaaatgctgggagatgggctaaagagttttgattgtattatcgaattgtggggatccattgaaaaacaaggctagagctagtttagaggggtcacaaatctatgttattctgatagggtgaggtctgactttgacaaagataaactcaaaagcaggatcatcatctagaggagccttcagtgatgctgggaggcattgctgagagctgaaccaaggcagtgtcagtaggtgtgaggaggaagagctcaaccagctgagctgtaatggagaagaaattacctacaactggtggctccctgcaactgttgggtgagggaaagggaggtatgctggatgccccagattccctgcctggggtgggtggtatcatccaccatgaggagagacttgggaatgcaggaggatcagcaggtttgggagtgaaagaaattgagaggttgttttaagtgtgttgagttcaaggcagctaagaggaaataaacatccagtacagttgagcatatgggccactcactcttctgagagttataggctaaagcggaaggtgtggagaaactatttctcaatagcccttgaagctatggcaaccttgagatcacctagggatgaatgtgaggagagactgaggctgtgacattgggggagtaatagagctggagcatttgggacactaggtggttgtgatgtcataggagttcaggtccatttgattattctacataaagtttaattgattaactctctatttcaagtgttctttaaataccattttatgactgcaatcaaatgaacagaaggcattgaaagacaactatatttaaatatttattctaattaaatgtctaaaatcttaatgatgtgtattttgtataatcacactgtgagtactacatagagtgcaatgttaactctgccagtaggtgccactaagagcacctggaaaaggattctaaggaataatcataggaaaagaaaatgaagagtgcaaaggcttgtaactttgacttgaatctatttctctttaacaattacaggatggttcagcaatttgctgtggactttgagaagagaattgaagggtcaggggatcaagtagataccctggaactctcaggtggtgctaaaatcaatcgtatttttcatgaacgctttccttttgagatagtaaaggtttgtgtcaaacgttatttttttcttagtttcacttcacttccatattctgttttatacaacttaatacaatattgtgtgagtggtatagaactaacatagttctttgaacaaaacctccatattcaggtaatgaaattcaggagaggaatatgttcttactgatgattctgattttatttaatgagatttaactacatttcaaacacaaatactaattgagtttcctagtttgttgtctaattaatttaaaaatatttcttaagcatgtactatgcaccacatttctaggtgccagtgattaagacagagaagacccttgcttgtctagtggggaaagacagaaaattaacaaatagacaaaatacgaaagtttcaaatgtttttatgtaacatgatatgagagaggggatgggtgagccacttttaatggaataatcaggcaaattctgtctgagcaggagacatttaaactgtgcccagaatggcatgaagaggtcaactgggtaaagatctgggggaaaggggttgttcaaggcagaagtagcaacctcgggtaaggcactaaagtatgacaggtgaagaacagatgtggctgatgaaggagaggggcatgaagtgaattcagagagggaggaagtgtccagttcacacaaagctttctaggttgaggtaaagtctttatacttaacaatgggaagttacaggagggttttaagcagtaatgtgacttgatttgttgatgattttagaagaatagtatgcctgctggattgtaaagagccaagagagtgaggagaacagtaggccagaccaggggtggattcattttctgtggagtctgaagcttctacaattttacaggcccccttgaagaagaatacaaaattataaacacacaggcccagggtcttggaagaggcttgtgcaagggggaaatgctgagaattaaacttctttagctttccagtaaaagtgccccagcaagaaaggatagagagatgggtggctttggggttttggagataaagttgctagggcttcgattgaaatgggggaatggaagaaagggaagttttgagatgacttccaaggttttggctttcacagctgagggagtggtagtgcccatcagatgagggaaatggaggaaaacctctgtttgtatggagaagtgaattaggagttctgttttggatgtgctaagcgtaaaatgcccaataggcagttgagtagttttagggaccatgctacttgtctcaaacagagaggtgagtgcttatgtcttcgtgtgggaggcaaatgggtaaatagataatttcattaaaaatgtgctaagtaaagtgataaacttcagcaaagggtactatggaaacacagcccacagacatgaatcccagctcaagtgtgtaagggagccaggcttctgagctgagtttggaaggatgagcagctagttaagcaggaagaggtaggctacaggagggggtgatccagacaggagaggaatgagctatgaagccatcagttatgggtagagacctagaacaattcgtcattctagggcataagctgtgaggggaggaaatggacagacaatgaagccggagaggccaaatctcagaggtcagggttgaactcaatgttcttgggctatcccttcgaggtctaagctctgtgacactttggtcctacttccaaatagatttatggtacctagcgcttctgagaaatatttgtaatctatcctgtgttgtctttttaaaatattactaattttcttttacaaagaggcctttaactcaaatgatttaagtggccagggacaaaagacagccattgttaatttcaggacatctgtactgctactgcacagcaggtgaaactctcatttatgcattcttctgtgccctcaaatttaccatattcagcaaaagaatgaagaattatacatttcaaatgaatggctagatttatgtccagaaggcatccttatgcatagcactccatatctataacagagttaaaatccactgcccccaagctccccaaaatccctagtgttctgtgttgccttgaaatttatataaacagatgttttgaccatctgggtttaggttaggaaagacatgagtatccacttattaataatgaagtcaagttattctcattctgtaatgttcaacaatattattcaaaggaattaagtgtcataactatggctcattttgcatctgcagatggagttcaatgagaaagaattgcgaagagaaataagctatgcaatcaaaaacatacatggtatcaggcaagtgattcacatttttcttgtcatctgttcaagctaccaaaagaaaattaatgtttataaatggctaggaaactcgtcttttcatcattgaatagggtagaatacagaggtgggagtaagaaacaggaaatcctactttggggtttaatggtaacttcctgtattgctgtagtcagttttttccaagtgaaaaagcaaaaacattttctgcatttccagcctgtactctgcacaataggggattcgcagattagcaagaccccattctccagagccttcatttttcatgagggaggccagacatgctcataattaatcattacttacaccagagaagggacagattaattttgactagtgttgtggagcaagattgggaaagattaatggaggttgttactttcaagtttatcctttcctgtggggaggatggtttcaacaggccaggaggtgttgtgtgtgcatgtgtgcttgcacatgtgggagcgtgcatatgaagtgggcagcagtgtgatgagacaggagaggatggaaggatggaatggaggttgttgaggataaaagaaagggctttccggtggaaggggtgggatgaccaaaggcaaagaggtgagcgggcacagtatatatccatggagccaagagtcatgcatatgcattgggactggcttgaggaatgcagtcaggagagcagagggacctgagctgggtggggttgggggtggggtagaacttgtgtctgaatttccccttgtttaaagtgagattattctaaattaccttccatcttagtctgtttggactgctgtaacaaatgactacagactgggtggcttataaaccacagaaatttatttctcacggttctggagtttgaaaatcctaggtcagggtgtgagcatggtcgggttctggtgagatcccttttctggcctgcacagtgctgtcttcttattctgtcctcatgtggcagagagaaagctagttagctctctggcctcttcttataagggcactaatcccattcatgagggttctgccctcatgatgtaattacctcccaaaggccctacctcctactaccatcacattgaagggtatggtttcaacatatgaagttttaggggaacacattcagttcacaacaatttctttaaagaactatgataagaacaaatgattttaaagcacatatttattcatttcatgtacagaaggctaaacataacttaatgaacatatgttgaattgcagtgtccttaattcaaggaaataaaacttaggttgcctagtacatagattgcctcatacgaaggaggtggcccctgcctgttgtcatttgtggttcagcctctgccaaagggccaagttgagactgtgctgggaacaggccctgagaaggcaaagcttgacactgagtttgcatgtgatgggtgattttacaaaggagttatgatgcttgagttatttgttgttttaaaatttagacaatctgttggtgggactgtaaactagttcaaccattgtgaaagtcagtgtggagattcctcagggatctagaactagaaataccatttgacccagccatcccattactgagtatatacccaaaggactataaatcacgctgctataaagacacatgcacacatatgtttattgcagcactattcacaatagcaaagacttggaaccaacccaaatgtccaacaatgatagactggattaagaaaatgtggcacatatacaccatggaatactatgcagccataaaaaatgatgagttcatgtcctttgtagggacatggatgaaattggaaaccatcattctcagtaaactatctcaaggacaaaaaaccaaacaccacatgttctcactcatagatgggaattgaataatgagaacacatggacacaggaaggggaacatcacactctggggactgttgttgggtgggagtaggggggagggatagcattaggagatatacctaatgctaaatgacgagttaatgggtgcagcacaccagcatggcacatgtatacatatgtaactaacctgcacattgtgcacatgtaccctaaaacttaaagtataataataataaaaaaaagaaagaaaaaagagaaaaaaaaatttagacaatctgctccacaaatctcaaatagtatgggcagatacgagtttacaaagtgaagaggagaaaacatctataaccaaatctaacgttttttcttttaccatcgataggatttctaagctccctattctatttcttctccaccaaatccagaatacatttggtgtagaaactgttttgctttttagctgggcagatttggtatttggacatgtttatctgataaatgcagtggaaccaaattacattttttggggtcatacagtatttgaaatcagccaaatacagtatttttacttcacttgtaaaactcattaccatatacagcttttgtcaaatataactgcaaaatctcagtaattcagaattgtcaatttctgatttatatgcctaccaacaggggattgttggtggttattatatgcctgtaagatgataagaaatgcacaatgtcctgagcataagacatactcatggtatgcttatttaggcctttaaatatatatttggtttgacaatttttttttcccatttgattccattggctatttgaatagtagaagccctctttgcccatgaaggacttgatggaagagatgctttgtttttcttcattgttttgttaacactgaatgctgactatgagcaagggagggagacagtccttatggagcaaatcaagataaatagggtaacaactctccttactgtgtatcctgcaatgtgaaatagaatgctgggcttccaagaaggaaggtctcagcagcaagactggaactataagtgcttgctttgcatctgggctttaaagcacaggtgggatttgaataggccaaaattgttaacagggtaaaatgaacatcatagacaaaggcaaagacatacaatataagcaaaggcaaattgactgaaacatagggtacgtgaaaggtgaggagaaaaataactgtgaagaaagattagagtcaaacagtggaaaaattttaatattgtactaaacagtttggatttgattctgtacctcgttcagagaaattaccattataatgtagtatgattactacagttagaaatagaggtgagcatggggtgctaagcaaatgataagaaggggcgtcaagtcaagatagtataagggaagtgttgaaaagattttccaaaagaggtaccatagaattcagttgcaggaagagaagttaactaaataagaataggtggggaggggagagaagagggcctaggagtggggaggacccagtgccaaagcctggagcctgccagccttcagtcatggccaagattcaaagtcccctgttattgtagcttctctctactgaccttttgtttaaatttgagtaatcatttttcattttttatgaatcacatatacacatgcacatgtatatatctgctttcctgagctcctgttcagcatgagaaaagcattattataacaccagtttgaattaattagagcccaaaggaagacacttgttattttggttatcatttgttatttttataaattcattatttaggcatcttgaaatattaaaattaattcataactccccttactgtcttatactcccagtaccccaggccctcagattgggaactatctgtaatatagttgtcctggaatggataaattgtataatctagaaactctactattttagtgtataaaaagtgaagctcactcgctgctccacaaagggcaaggaattgattttggaatctttcagaaataggaatctaaattgagaacaccatttctattgtagcatttctttttattgctgcgaaacagcaagttaagacaaattacagttaaatattagttaaaggtcacatgatgtgccacataaacattttgggcactatgtaacttttaaacttggtctattacatgcttaatttaaatggaatgttaatttaaacatttttcaaaagatttttgaatattactcaattaaaaaaatctcatgggctgcttgctttcttaccttcaggacagggttgtttactccagacatggcatttgaagcgatagtcaagaaacagattgtaaagttgaaagggccttccttgaagagtgtggatctggtaatacaagaattaatcaacactgtgaagaagtgtaccaaaaaagtaagttcgaattatttaactttccagtacgtggctttggtttatcaacattccctatctcattgcatgattctctttccctgaccctcactttgttatagatgttgtgtgtttgcctacagggaatggttgtggaaagtactgagtgggaattgctttcatgaagggcagacatactgtcttctatcattcctaatacggtggtttagaaagagtatatttctttggctgattttccccatgttgtcttaaacaaataaacattatttccaaactattaggcaaatgccctaagctcatttttcctgtggtgcatggatgagggtaattgttagagaaggaaatcactgatagtacatatatcaataagaaaattcttctaaattgcaaatatgtattccacttgagtctggctgttctgggaaggggcagtgtagtgtagtggataagaacccagccttggggtttcaatgacctagattgaaatcctggctctgatactttctgtgtgaccttgggcttaacctctctagtcttgttaatttatctgtgaaatgaggatgatgatgataatagtaataccaccttagtgaggattaaacaagatgatgcctgaaacctatgggacacctagcacactgattaaccataatttaagtgctcaataaatggtggctgatccataaattgccattttagcagcagtcagtattctctaccctgaatatctattaaatctatgctgtagagtgctggggcaagacttcccaagtaggaggactcctcactgaggaatatggagaacatgtgctgaattcctcggttcatgaaaagaatatcttgtattgaaaaacacaaaaagagaattagtgatggtatttacagtagggtaggtctagccccctgacagttaacacttgtgcttttaatatttcttcaacctatggataattctgtttttgttagttttgttatccttccctttatagatggttactagcagttacctttctgaaaaaccagtgggaagaaagagagagaatgagagggacagagaatgagaatgaatatgaatattagttcccagttacctgacagaaaggctcaggtaaagaacagatgtacatagtagaagaggcaaatgggctgaattcctagatgtgaaggctaaaagaaaagcagtaaatggaactagcttaggacccagaggtgactgggaggttcagaccccttctctagagctcctactgctcttccacctcatttcctaaactcctggtttctcttctccaaaacaagaaagagccacaggagttaagggactgagggacagaaagaagaatgcccatggagttgaaaaaaatcaatctttctaccatctcaccagttggaaacttcaagtcagttgctaacactcctcatccctgctgccctcacctactcttcagaatgcaacctatcgtgtcccttgtacatttaaagctctcttaattgatctctctactgactttcaagattaactgatactgagtttcctactaaccctaaggattgccactctcagcacacagatgtgtttagccagaggcttctctttaggttgtccatgtctcttactcccaccaattatcctgtcttctttacaagggacagttgtgctgtgtctgttcccaaacccatttagccagttgcacttattttaataatatactttaaataaagagagtaattaaactgacccaatgcagaaaagactttgagttttgtttctatgaaaactaaactgaatgctatgaaaagacttgataactgttagctacaaaagctctgctattgactaggtgtaggcaaggtaatgaaaagaatgtgtgtgtgtgagggattataaaaatctggataggtttggcattcaaattatttcacaagtatcttcatgttctccctccactgtaaagaaagcaaaactggaaatcatagatgaaggatgtggtttatgtaagacagaagatgcataactccaatcagcagatccatatgcagagaacagatcttggccttacatcaaaagattggcacatgtgtggacatttatgttttaagttatataaagtgtttatggtatgcatgaatcttttttttttatcatttcccattttatccaacctactggaaagccaacagtcagttctgatggcatgggatgagacagcttgttcccagacactttttggcttctattcttgctctctaccctttccattatgctccttggattggtcttctatacatttttactatcttctcaaaacattttatagtttgccttagttaaacacaaaatctagcttttcccctgaggttactatttaccctttagctttcttcagtgaaggatatttattccagcctaaactggaaaaatctgagggcctttattgggtatgacatttgccatttttccttttgtggcttccaaagattattccttcaccttctcatagtcttccattaaggcccaggtggtgccagctgtacctgttccttatattcactgtcaccaccaagttccaggtcactcccttgcattcatcaggatctttagaacctggcttacatttttcctctccatacccaattcaccttcaacgtggaagtgttcagtgtccatgtagatatcatgtccaatgcctaaaagctacttttctttgaaatctttgctctccattcagtccactctagcatcatagtttcatgacttctggctcttgttgtcatcaaaaaatgttttactaggaaattgtaaaccttaaagggcctgcagaatgctgatcacccccttcatcctctttagattttaagccaattgggaaattaatggaaaagctctattttgaaggtttgaaatttagtgtccacttcactgctgacagatctaggttggaaaatgtgtctgggccttgctgctaaagtgggagcctcctgttatttccccttccagcattaaaccttagagcccacaaggtgtatgggtgagcagatgtacatccatcattagtttttttatctattacttcagttccacttggattaactttgccacctgttgaaactccaggactgctaaaatttactgcttatctttattttcctttcccccaggcttctgaagagcttggagataattgtctatttgtgtgaactggtgccccaatatattcatggtcttcttcttagtccaatttcaactgctgccccatagtgcttcagtgtcttagtaattagcagcctcctgtgttctccatgataatgatgttaaacttttagcactctcttcaagcgacctgactcatcactttcatcctcactttcaatgaaggtttcgcagaaaaaataggggccataaatgggcactatgaaacattgattcttgccttctatccctcaaacttacctgtattcacagccacacccccttcttatccttgtctctgttgagatagtattcctgatcaagggggtggggggtggtttcctatctgtactctcacctccttagaggatgtactctttttagccttttatttcctgaatcatcatcttctccatcacattttaaaaaatcaacatataaatatatctatgtctgtcctaatttaaaaagaaacagtgacaaacactcacctgctgccctatttttctcctctcatggtcagccttcttgggaaaaaagtagtttatgctttgcatctttactgtgtcatctccagttaattcctcaactgaaatttggattctaccccactactctatagagttaattattgcaaagatcagtgagagtcctgattgccaagcctaaaggacgctcttattcctgagactatattccactctctttataaagctggcactcctctctcatgggttctcttccctctttctctttattccttctctacctcctttgagcattcatccatttttgcttgcctctaaacactgcgatcccacagagcttactcctggttttattctcttcttactatattttctccttgacagatcatgtctgtaatagttcaactaccacttaaaatattggtgattcccaaatctgtacctctagctcaagcctctttatggaaactgtctacagactactgcaactattctcttttcttacttaaggccctgaacattacttttaagcctgaattattccagtggccccctaactgatctatttctagcctggtcaccctcaaattcatctttgccattgctgtcaaagtgatttttctaaaatacagctatgccttttgcctatatcctcaaaattattcaacgactcctcagagccttgaaaataaagttcagatcatttagggttgtatttaggttccctgtctgatctctgaatacttctccagctatatctttggtcccactgcttgcttcagccattctagatgatttgcactatcctcaaagatttttccttcttttgacatttgcataagtgattccttttgtctagaatgtctcactttccctcctgtgtttacctgccatcccctctcatttttagggaggcagctcaatcatcctattttccttaaaatcttcctaaagggcctctgtgagtcacttcctggtctctctcccaactccctttttagtgcttctgttgataccctatgtgtatttatatcatagcatttatgatactgccttgagatttatttgtatgtatttgtttacatatctcctcttgttgattgtaagctcctttgaaaaaaaaggcgctgtgttttttatcttctctctagcctgtaacacagtgaccaactccacataggggcattttataaatatttactaacaatttagatgttctaaagttatccagtggtcaaaaatatatatacttggttttaaaatagtattttagccattccttttaaaatgataaaatttaggcaggttttctttcaaacatctatccttttccttatgctgcattttgatgtttttcatttttggccttattaggtatactttcaatatcttttatttaaaaactggtctaattaaaatattttgcaaagcaaaataatcctaattagagttgagtctgctgggactttattacttgcctcgttttgaacatgagccatagataaggtgactatataatttattgttcagtgcaggacatttttgagacttaaagggagtgctatgaatactttcactggagtaataggagtaaacaaagactgcctcaggcaatgtgaaaataagtaattccagctatattgtaattatatatatatttctgttatagcatatatacatatataaacataaaatacagttttcatttacaactcctcatgtgatgcctcatgtgtaaaaaccttaaatgcttttttcttaagctgcataaataaacaccagtgaaaaacatatgtgatttatgtgtgttcaaacaacaaaacacaaagctagactcctaacctggggaaatgcatttcttcccagatactttctcactgttgtctctggggcactggaggataagacaggaacattagagctttatgagctatttggcttcatgccagggacatctcaactttgaaattattttggtgggcatctcttttcagctgctttcctttacctcctcttcaccagtgcatcatcacagggtgctgaaggtcttttcagaaagcactgagaggaacatcttgattttttttttaaccacagtttagcaactgtgccatttactggcctcttgggaaccgacattcttggatcattattatactaattaattgatttttttcttgtttagaaaaaaaaagttttgcaaggagaaaaaaaataccttagtcagctattagaaatacagggaaagggccaggcgaggtggctcatgcctgtaatcccatcactttgggaggccgaggcggatggatcacctgagatcaggagttcgagaccaccctggccaacatggtaaaaccccatctctactaaaaatacaaaacttagccaatcatggtggggggtgcctataatctcagctactcaggaggctgaggcaggagaattgctggaacctgggaagcggcggttgcagtgagccgagattgcactattgcactccagcccaggcaacaacagcgagactccatttcccccccgcccccccaaataaagaaaaagaaatacagggaaagattttccattaagaagtgctgttagaagaaatgccaaattttgtggcttattaggtaagtaaatatctagctctgaatacacataactaaacaagtgaatccaagtccttaccatggcttacaaggccctagacaatcttgccccctgcttttcatctctaaactcatcttctcccctttctctcctcctcttggtccactccagctgcactggattccttgtttatttagcaggccaaggaaacatgtctgtagagcctttgcacttctcattcttaatgtgggaaatgatctgccccaagatatctgcatggatcaaaccattgcttctttcaggcctctgctattcaaatgccccataaagcagagtctttctccgacttttctattttcagttgcatagccttcccacaaatacacacacacacacacaccacacatgcacaccatcgttaatctacttaccaaactttttctttgcagtatatattactattaatatattaattatattatttatgtctgctgttgctgtgttataagataattaagggaccttgagaatacaagttccatgagaataagaacttggcttattaagctcatcgctctattttccacccctaaaacagcctggttttcaacaatgattattgaatgaataatttaaaaaatgaattatgtctcattgattcagcaggtgacggtcagtttggctgaagtaggatgaaggaaaatggcttcaaagcatcatactatttaggactttcttttaggtttatatagatgtgctatggtttttacactgtatgaaaatacttgcatttcggggaggagccaagatggccaaataggaacagcttcggtctacagctcccagcatgagcgacgcagaagactggtgatttctgcatttccatctgaggtaccgggttcatctcactagggagtgccagacagtgggcgcaggtcagtgggtgcgtgcaccgtgcacgagccgaagcagggtgaagcattgcctcactccggaagtgcaaggggtcagggagttccctttcctagtcaaagaaaggggtgacggacggcacctggaaaatcgggtcactcccacctgaatactgtgcttttccgacaggcttaaaaaagggcacaccacgagattatatcccgcacctggctcagagggtcctacgcccacggaatctcgctgattgctagcacagcagtctgagatcaaactgcaaggtggcagcgaggctgggggaggggcacccgacattgcccaggcttgcttaggtaaacaaagcagcagggaagctcgaactgggtggagcccaccacagctcaaggaggcctgcctgcctctgtaggctccacctctgggggcagggcacagacaaagaaaaagacagcagtaacctctgcagacttaaatgtccctgtctgacagctttgaagagagcagtggttcttccagtacgcagctggagatctgagaacgggcagactgcctcctcaagtgggtccctgacccctgacccccgagcagcctaactgggaggcacccccaagcaggggcacactgacacctcacacggcagggtactccaacagacctgcagctgagggtcctgtctgttagaaggaaaactaacaaacagaaaggacatccacaccaaaaacccatctgtacatcaccatcatcaaagaccaaaagtagataaaaccacaaagatggggaaaaaacagaacagaaaaactggaaactctaaaaaagcagagtgcctctcctcctccaaaggaacacagttcctcaccagcaaaggaacaaagctggacggagaacgactttgacgagctgagagaagaaggcttcagatgatcaaattactctgagctacgggaggacattcaaaccaaaggcaaagaagttgaaaactttgaaaaaaatttagacgaatgtataactagaataaccaatacagagaagtgcttaaaggagctgatggagctgaaaaccaaggctcgagaactacgtgaagaattcagaagcctcaggagccgatgtgatcaactggaagaaagggtatcagcaatggaagatgaagtgaatgaaatgaagcgagaagggaagtttagagaaaaaagaataaaaagaaacgagcaaagcctccaagaaatatgggactatgtgaaaagaccaaatctacatctgactggtgtacctgaaagtgacggggagaatggaaccaagttggaaaacactctgcaagatattatccaggagaacttccccaatctagcaaggcaggccaacgctcagattcaggaaatacagagaatgccacaaagatactcctcgagaagagcaactccaagacacataattgtcagattcaccaaagttgaaatgaaggaaaaaatgttaagggcagccagagagaaaggtcgagttaccctcaaagggaagcccatcagactaacagcggatctctcagcagaaactctacaagccagaagagagtgggggccaatattcaacattcttgaagaaaataattttcaacccagaatttcatatccagccaaactaagcttcataaatgaaggagaaataaaatactttacagacaagcaaatgctgagagattttgtcaccaccaggcctgccctaaaagagctcctgaaggaagcactaaacatggaaaggaacaaccggtaccagccgctgcaaaatcatgccaaaatgtaaagaccatcaagactgggaagaaactgcatcaactaacgagcaaaataaccagctatcatcataatgacaggatcaaattcacacataaaaatattaactttaaatgtaaatggactaaatgctccaattaaaagacacagactggcaagttggataaagagtcaagacccatcagtgtgctgtattcaggaaacccatctcatgtgcagagacacacataggctcaacatgaaaggatggaggaagatctaccaagcaaatggaaaacaaaaaaaggcaggggttgcaatcctagtctctgataaaacagactttaaaccaacaaagatcaaaagagacaaagaaggccattacataatggtaaagggatcaactcaacaagaagagctaactatcttaaatatatatgcacccaatacaggagcacccagattcataaagcaagtcctgagtgacctgcaaggagacttagactcccacacgttaataatgggagactttaacaccccactgtcaacattagacagatcaacgagacagaaactcaacaaggatacccaggaattgaactcagctctgcaccaagtggacctaatagacatctacagaactctccaccccaaatcaacagaatatacatttttttcagcaccacaccacacctattccaaaattgaccacatagttggaagtaaagctctcctcagcaaatgtaaaagaacagaaattataacaaactatctctcagaccacagtgcaatcaaattagaactcaggattaagaatctcactgaaaacccctcaactacatggaaactgaacaacctgctcttgaatgactactgggtacataacgaaatgaaggcagaaataaagatgttctttgaaaccaaggaggacaaagacacaacataccagaatctctgggatgcatttaaagcagtgtgtagagggaaatttatagcactaaatgcccacaagagaaagcaggaaagatccaaaattgacaccctaacatcacaattaaaagaactagaaaagcaagagcaaacacattcaaaagctagcagaaggcaagaaataactaaaatcatagcagaactgaaggaaatagagacaaaaaaaacccttaaaaaattaatgaatccaggagctggttttttgaaaggatcaacaaaattgatagactgctagcaagactaataaaggagaaaagaaagaagaatcaaatagacgcaataaaaaatgataaaggggatatcaccacagatcacacagaaataaaaactaccatcagagaatactacaaacacctctacgcaaataaactagaaaatctagaagaaatggataaattccttgacacatacactctcccaagactaaaccaggaagaagttgaatctctgaatagaccaataacaggctctgaaattgtggcaataatcaatagcttaccaaccaaaaagagtccaggaccagatggattcacagccgaattctaccagaggtacaaggaggaactggtaccattccttctgaaactattccaatcaatagaaaaagagggaatcctccctaactcattttatgaggccagcatcattctgataccaaagcctggcagagacacaaccaaaaaagagaattttagaccaatatccttgatgaacattgatgcaaaaatcctcaataaaatactggcaaactgaatccagcagcacatcaaaaagcttatccaccatgatcaagtgggcttcatccctgggatgcaaggctggttcaatatatgcaaatcaataaatgtaatccagcatataaacagaaccaaagacaaaaaccacatgattatctcaatagatgcagaaaaagcctttgacaaaattcaacaacccttcatgctaaaaactctcaataaattaggtattgatgggacgtatttcaaaataataagagctatctatgacaaacccacagccaatatcgtactgaatgggcaaaaactggaagcattccctttgaaaactgtcacaagacagggatgccctctctcaccactcctattcaacatagtgttggaagttctggccagggcaattaggcaggagaaggaaataaagggtattcagttaggaaaagaggaagtcaaattgtccctgtttgcagacgacatgattgtatatctagaaaaccccattgtctcagcccaaaatctccttaagctgataagcaacttcagcaaagtctcaggatacaaaatcaatgtacagaaatcacaagcattcttatataccaacaatcgacaaacagagagctaaatcatgagtgaactcccattcacaattgcttcaaagagaataaaatacctaggaatccaacttacaagggatgtgaaggacctcttcaaggagaactacaaaccactgctcaaggaaataaaagaggatacaaacaaatggaaggacattccatgctcatgggtaggaagaatcaatatcgtgaaaatggccatactgcccaaggtaattcacagattcaatgccatccccatcaagctaccaatgccttttttcacagaattggaaaaaactactttaaagttcatatggaaccaaaaaagagcccgcatcaccaagtcaatcctaagccaaaagaacaaagctggaggcatcacactacctgacttcaaactatactacaaggctacagtaaccaaaacagcatggtactggtaccaaaacagagatatagatcaatggaacagaacagagccctcagaaataacgccgcatatctacaactatctgatctttgacaaacctgagaaaaacaagcaatggggaaaggattccctatttaataaatggtgctgggaaaattggctagccatatgtagaaagctgaaactggatcccttccttacaccttatacaaaaatcaattcaagatggattaaagacttaaatgttagacctaaaaccataaaaaccctagaagaaaacctaggcattaccattcaggacataggcatgggcaaggacttcatgtctaaaacaccaaaagcaatggcaacaaaagccaaaattgacaaatgggatctaattaaactaaagagcttctgcacagcaaaagaaactaccatcagagtgaacaggcaacctacaaaatgggagaaaattttcgcaacctactcatctgacaaagggctgatatccagaatctacaatgaactcaaacaaatttacaagaaaaaaacaaacaaccccatcaaaaagtgggcaaaggacatgaacagacacttctcaaaagaagacatttatgcagccaaaaaacacatgaaaaaatgctcatcatcactggccatcagagaaatgcaaatcaaaaccacaatgagataccatctcacaccagttagaagggcaatcattaaaaagtcaggaaacaacaggtgctggagaagatgtggagaaataggaacacttttacactgttggtgggactgtaaactagttcaaccattgtggaagtcagtgtggcgattcctcagggatctagaactggagataccatttgacccagccatcccattactgggtatgtacccaaaggactataaatcatgctgctataaagacatatgcacatgtatgtttattgcagcactattcacaatagcaaagacttgaaaccaacccaaatgtccaacaatgatagactggattaagaaaatgtggcatatatacaccatggaatactatgcagccataaaaaatgatgagttcgtgtcctttgtagggacatggatgaaattggaaatcatcattctcagtaaactatctcaagaacaaaaaaccaaacactgcatattctcactcataggtgggaattgaacaatgagatcacatggacacaggaaggggaacatcacaccctggggactgtggtggggtggggggaggggggagggatagcattgggagatatacctaatgctagatgacaagttagtgggtgcagcgcaccagcatggcacatgtatacatatgtaactaacctgcacagtgttcacatgtaccctaaaacttaaagtataataatgaaagaaaaaaattaaaaaaaaagaaaatacttgcatttcaccccctctaatggttgccatccagtcaaactctgtgctgtgctttgcatgtaatacatgtctaatgtaataggctttagtgcccaggcttcgaatcagactggttattaaagtctgaaacttttgttgggtattataggaaattcaggcctgggacttggttttaatgggatagaatctcaccttttcatcttacaactcattaaaggatttgcaatctttataattggttcttaatttataatttaccatggtccctgattttcctcccactttctgttgtgaagtttttttccattttaactgctcattaatatgtctaccagagataaacttgggaagagagagataaaaatctggttatgatcttcaggtgttgttttgccaccatgtcaacccaccctggattcctttttggatgttttctgaattacttaagtaagaggctcttctgactactctgcggcacccaagttttattcactcaaggttggactttttgtttttgtttttctactctccttgtttcttaggtgaggacttttttgtttttattccttagcatttcataaataacactagagttctcttcatttctctgtttaaaagtttttccatcttatacctcaccacttctcctgctatttgttgaaaatatttgaggtttctggattaaggatttgcccacctggagaaggtgggctaacactagcccacttggtcccagttcacctagttgggatctggcactccttttcccttcctgccaacttcactttgaccttctttgacttctcatatgccactcatatgccaatgtagaacaccccataaggaactttcccattaacccctgtacaacttagaaaacagtcactatttcttgatctctttatattagaattgcttcttatcttcaatcacctttgtaaatgtttctacaaatacatctgtttaaaaaatttttttcatagcaaatgtgttgtgcgcagatgactgccttctcatatcctgaataaatacaacactatgctatataaaaacaaaggattgctagggattttgttgggttgggtgggtggttaattcacagaaaatgaaattaaaaaattgtatgcttttatgagtgctaaaattcattatttctatttggtttgtagcaagcagccagcatttaaaggtttatagctttttcataaaagcccttatctttaggtcagccaaatcaatcaagtcaagtgatatgtatagaagaaattttgttctgaatttattttcttagacggttacctaataactccagtctttgctagaggcatcaaacttgttcctcttgatgatatggaaatcttgcctggtctcttgaccattttgagaaaaatgtactagcatagcgtagatcttatggtctgataaactgttaatacattttggaagtgtataatttttgttttgttggatagaaatgtctcccaagtgtttttttttttctctaggaaaatgtgatccatactgaaattaaatttttatattgaggttccaccaaaataattaatcagtaccctaaataacacttacaacattggaccttattaaaacatgttttgctgctttctctcagaacatgtataattaaaatattctccttgaattaaatattgaaggttttgattcctaaagtcgtgtatattatattatttctccattgaatcttctttattatttaagaatactctacccaggctggactggtggtgggcgcctatagttccaactactcaggaggctgagacaggagcattgcttgaacccaggaggtggaggttgcagtgagccaagatgtaccactgcactccagcctgggcaacagagcgagactttgtcaaaaaaaaaaaaaaaaaaaagaatattcaatgcaatttgaactataagctatttagaactaatttgctgtataataaatgtatagctttgactgcaagtttcactattataatataagcatcaaatcctcagaggacctctcacacctggtttatgcatttatttcttcatatttcccattggtttttaaaaaatatttctcttgtatgactatttatctgtataggcaacctgccactcaagactatgtggtttctaatatcaggtgttatgatataaactgagcatggagctggactgtagcagttgcaccatgaatgactgatgtgacataaatttaggaatgtaattattataactaatagcaaatccttcatcccttgactctctataaaccaatttataggttatttaattaatcattagaggaataaaggcctaaagacatcttctagatcaatattatttaggcatacatacttaatattctgattactttgacaaataagaactcccatattcttacaactgtaggcttttaatttgacattcaaattaaaaaagtgcaaaagtgattgacaattataatggtataaatgattgaggaaatggtgattgcacattaaataagagacatagaagagaggtgagggattgaattgagcaatcaaagttaagtatgttttaaagctaagtaaagggtgacacaaactgagcagggcacagtttgaatgagatcatgaaataatctcattatgagattaaatgagataatgaaatgagtggtagaaagcctaatcagaaatcaattgaaatgtcagtaggactttattttttaacctctgtatgtatgtatcttaagaattgggactatttatatgtttgggactatttatatatatttatatattttatatttgaaagccagcagttaaaaccaagattttgactcttatactcccacaatcagttcaatatcaaccagctagtaaccaaaccagttgtttcattaatgccattcagtggtgggcctagatcctacattgcttagtgtctcttcaaggtttttcctcctttgtctccataatggtagttcttctagtgtgttctctgtttcttttgttccacttagaattcaggcttattgacttccagttgtctcaattgtaggtacaaaattgtggctcttacagattccttttctggtagaattaagcccatgggcagtaagcttgaaaagatcaggagacacacacgtgcacacaaatcaatgctcctgccaaggccagtagattggaggcattcttagatgtctctacttcatgggatattcttgtcattttggcctttccctgacttaatgatggccatatactggcctggggtccttcagctatcaagtgtttagtatctgaataaatatttatattgccactatttgatggttttaaaaataactttctgctgtaatctatttgctaaatgctgttaaagccatctcactcttccttggtagacctcaaatgcttgcgtagttacttctctgaggcaatgtgattctataatagtgtggctgtcattgaatagcttgggaagctgtctgagtgcaggcggaattgattgtcttggtgacctagggcaggctaatgtttggtgtcagatacaccactcaggtttgcactagtcaagaaggactggaattgatcagctatctcttccactctgaaggcttttataagcctcacaaaaaataacttggaggactttcagagagtcaagaggggttctggtataatagagctttttctggagaatgtttccaaaatgggaagtatgagctccatttgtatcttgcggtaattcatgaaataagcccccaggtgagcgtgcatctcaggattcagataagagggtgagaaatcgaggacctcatggagacgctggtgatgatttttgtggtaaccaaagcagtcaggtttctatggttttatgatgttatgaacataatctatatccactgttgaaatatttggaaaatgtagataaataaaagtgtgcataattcaaagagttattgctattaacactttatagtatctgtgcaaatctttttctatgcacagagagtagacttgcagcaatggaagatttaatgtatatgagatctcgtgattatgatggtttcatgaagtactgcagtttgttaacttgctaagacactaatatatgttgtgcatgctataaaggtaatgtgcacagtgacctcaggtgaccatacagaagccccatttcagggaggcctagatctaactccttatgagtttggagaaatattacatgctataatattactcaagaatgttggtatttgtaagattgggctatatccttgaaaaatgtcaagggtgtatggtggtgtgtgactctgtgtgtgtgtgcatgtgtgtgtggatgtgtcttagtccattttctgtagtttataacaaaatacctgaaactgggtatacagaaaaggaatttatttctttatacagaaaaggaatttatacagaaaaggtatttatttcttacagttatggaagacccagtgttgagggtctgcctctggtaagggccttcttgctggtgcagggtatcaatcatattgtaagggtgctgagtgtggtagcatgctagctcaggtcgctagtcctcttcttataaagctaccagtcccactcccataacctattaatccattagtccatgaatggattaatccactcatgatggcagagccttcatggcccaatcacctcttaaaagccccacttgtcaatatagccacattggggattgaattttaacatgaatttggaggaaagaaatatccaaaccaaaacattatgcttgtgcataaccacattatatatttagtagcctaattttcttcaaatagtgttgtaaatactttaccatgtcattagttattattaaaactgttattcaaaatggctacattacatcacgtaagtggatctaccttcatttatttaacatcatcagatactaggtagtttatagtttgtttatcttattgttgcttttccaactaatgctgtgatgaatgtccttatcattgtagttcagaattctgtgaggttattaggttgagatctctctctctgtctctgtgtttgtgtgtgtgtgtgtgtgtgtgtttgtgtgtgtgtgcgcgcgtgcaagacttttgatacataatgtcaaattgctttccagaaagatttctcttcttgacacccctcagcaagtttaaattgtgctaatctcagtataccctcacctgtagtaagtcttataaaaaaatagcaatttgccaatataatagttatttcttttctttgcattagatcacttgtacagtttgtttttccttctgcttattgactattaagtcttttacaaattaaatcatattctttgcctattttattgagctatctgttaatcttattaatttgcaagcactttaaaaatcatcattggaattaatattttgcctggcctaagtcatgaatgtgcccacttttctccatttccattgctgtcatcccagtagaagccaccattatttccattccatctgaattgcttcagtagcctaaattcctgatagaattgcaaggatctgcttgatgtggcccctctctacttttctagctttgtctgaggatcatactcctcagtttctgcacggactttcttttacttttatcgccactaattgcccccacttccaccatgccttcacacatgttcctgttcctggcaagcttcatcttctccacggccattctcacacacctttgcctgtctaagtcttccttctggattagggctccttaaacattttcatagcatcccattctctttcttccttatattgaaaacaactgaattaaggtattcacttttgcaaactatgttttgaacaattacctgcataatttagatggggttaagtgattgacatacacaatttccatagttttgcaaaaaaaatgtacatatacacatatattttctgtgggggagaatttaaaaagttaaaggagtctctttgtgcttcatgggatgaatcatgctcgaagagtaatggacaagaccatgggctctggagtcctaggacttaggttggaatcctgaaccaaccatttttgagctgtttagtcatgggcatgagttacttaacctctctgtgcttcacttttctcctctattaaatggggttggccgggcgtggtggctcacgcctgtaatcccagcactttgggagaccaaggcaggtggatcacctgaggtcagaagttagagaccagcctggccaacatggtgaaaccctgtctttactaaaaatacaaaaattagctgagcttggtggcacgtgcctgtaatcccagctactcgggaggctgagacaggagaatcgcttgaacccaggaggcagaggttgcagtgagctgagattgcgccattgcactccagcctgggtgacaagagcaaaactctgtctcaaaataaataaataaataaaataaaaaagaaatgaggttaataattatatctgtcttttctgattgctgtgaatagtgaaagaggtaattcatgaagttcttagcgcctgacacgtggtagacactatataaaatgttagtcattatccttttctttgtcctgttttccgacttcttcatctttgaattttattaagtgccaactcagcaggagcacagtgctagatggtatctagggttctgctttcttcctaaggaattgctctgctggttttgaagtgtttcctcaacataacaaggttacttctgatgatagtttgtgaagcctctcccatcaccttgacatccttctttaggagttgatgatatttcatttttgcttccagaatggcaatgaatatcttctgtaaaataacataatttatctctgcttcttttttggtagtgtaactttttgagtattaatactcagatctgcttttcttgacagctggcaaacttccccagactctgcgaggaaacggaaaggattgttgctaaccacattcgtgagcgagaagggaagacaaaggaccaggtaaagagaggtcttccctggtgggcagggagattgtgggaggtcgaaggtctctgcaaggttgtctggtagttcccaacagtcagcctgtcgcttaaaggaaaaaaaaatagtggaacacaactacattatgtttatttttacttatttatgaattatacacatactatattcatatcttgtttatgttaaaaatatgagcaaataaaaagacttcattcagaagaatgagatgcaaaagcagtaacaggagtttcattattttttttctcaatgctccatggatcatgcatacatcctactttgaaaaccactaatccagaaacataccacattttctctttaagacagaggttcttaacttttattgggcccacagatggactccagaagattcacaaactcctaaaacattatgcaaaatgctcagtgttttcatttttttctgaggagagagtggacctagattttcatcagcttatccatacaacctatgattgaaaaaaaaattgagaactactcttttaaacatttctattttgtgaatgtatgtggtttgtaaggagtgaccctgaaattgttttctaatcctagctttgtaatttggaaagattattttcaagtgaggataattcatttaaaaaagtaaaggactacgtggaaagaataaaaatcttcttaggtttaaatggatttttcttagttacttataaaatattataacaggaaatacaaatggttttacatacccttgaattccatgacacagctgcacgtgtgatgttgtggagagaacactggacttaggccatgtgctcgccacaaaataacatcatgttcttgtgtaaatcacttctttggactgttgttttctcatgtacagcattaatatattggtctatatgctctctgaaagcctgtgtaagttagtattacaggattttgtgattctcagatgagtgggaaggaggtgagggagaaatggggaaaaggaagaagacaaaataaaagagagaggaaaaaaccacagggagagacacacacagcacacagagtgtgcgtggggaagaggagcaggtggaggagaaaggagaaaaggaaggacagagggatggagacccagcagattgggacattcgtgagtgattccagtaaccaccttgtctctgcttgagctgtggattcattgtcactactttttatcattgtgttttgaaagttaattaatcaccatttatagttttcacttgtttaccaactttcacagtcttggatagctgcaatagccaaaagaggagaaaacaggctttgtgattcagttgagatgaacaaatcagtattaactcctgagtcagtgaaatcaagcctagagccagatatggagccctagggccagaggttctccctaatgtctaatgtcttggcccctcctgggctgagaaaacttaagttcttaagaatcagctgtactcctgaccttaagtaaataagctaactgttttaatttagtgttttcatctataatattcaaatgataataaatcctacttaactctttaggatccgctgtcaaaataatattggagaaaatataggataattatttaaagcattttaaatatttgtaatcatatctatgtcagttgctagcttcttcatatttcagagtttttgttttagtaaaatggcatgttcaaacttcaccatgttgttaagattgtgggctctgggctcagactacctgaatttgaatttcagctctgttgttaacattttgtgtaacttgtgacaagttatttgacatctttacacttcaattttcgcatcttaaagtgagacaatagtggtagttaactcacagacattttgtgaggatggaaagaagtaatcaaaatacaaggccaggtgtagtggctcacacctgtaatcccagcacttttgggaggctgaggcaggcagattgcttgaggtcaggagttcgagaccaggctgggaaacatggtgaaaccctctctctacaaaatattaaacaattagctgggcacggtggcctgcactaccagtagtcccagctactcggaggctgaggtggaaggatcacatgagcctgggaggttgaggctgcagtgagctatggtcatgccactgcactccagcctgggtgacagagcaagaccctgcatatatatatatatatatatatatatatatatatcttagttcttaattaattttagttgtttttgttgttattcccaaagagctatggcacatggtagattcgaggaagaattgccttttctgattccaagggaaattgttttcaatctgcaactcagttacagtggttaatttattcctcaagtaggacataagggatggagcaggcatctccctactaagtcacagtctcaggtggtgtggtccaacagttatcaagtgcctgtcaaagctggtagtggtcacctctaatatggacttgtgtggcatagcagaaacatgcctggttttggtagtgtggacatgtcattttggatggatctcgcatttgaattctggactctgctgcctgggaccatgtggtacttttaaagtatccagttagacagagtgacccatatcctcaggcctccgcgcctgaacagctctgggacattcttgcagttttatttctttctttaaaaagtagagttactaccaacttctgctctggaagctttgtgggaaaaaaaaatcttcaaaattaagaatatggaaagccataaatctgtctgtagctttttcttaaacaaaggttttttgaatgtctgagtgtgccagctgttagtcttggtgcttccatacatgtcactgcatgttgaagcagtggactttctgggcaactactgctaccaggggtagctttactttgcttcaactaaatattcaataactgtggatgaaaaaggcagtgagaaactctgagaaagtgaaaaaatgagaaaaaaatggattatttttcttttcatcccccacatgcgacctggctcttttcctagagtgaacacagactcccagtttccaggaatataatgagaacagccatagcttttattttttttccactttttttcctatactacagtccaagttaatgtgtgtgaacgtccaaaagctattcatgacagcctttggcaatgttgagaattatgtagatattttgctccttatagtggcaacaatttatttgtgttcaaatattacagtttattggtacaaacttttggccaaatggatttggagtatacaatttaactgaatctggctttattgttgggagaagagaggcaaaactacaactaatccaataatgatcacgcttcctaatgtttcagttttcttcaagatatgaaacaaaactctgactgtatgaatttttttcatacaagtatgatgttattgacctaatagcccccatgccttgactttatttttggtagtgggagtagatttggagtgatcttttaaatctttttttgacaggtccccttgtgactctcagcaagaattggtcagatgactggttgagattagccacaaaaacaaagcctccagcctatagcactgggtactgagtacaaaacaagaacaagtggccacgtactaattatatatatgtatatgtgagaataaatcactccctggaaagttaactgttcttggccaggcacggtggctcacgcctgtaatcccagcactttgggaggccaaggtgggtggatcacctgaggtcaggagttcaagaccagcctggccaacatggtgaaatcccatctctacaaaagtacaaaaattaactgggcatgatggcaggtgcctgtaatcccagctacttgggaggctgaggcgggagaattgtttgaacccaggaggcggaggttgcagtgagctgagattgcaccattgcactccagcctgggcaatagagtgagacttgtctcaaaaaacaacaacaaaaaaaagagttaactgttcttcaagcctggtagatagttacacaaataaggccgcaaatgtttattgggcacctattgtgtgtatcatgctaggctctaagttctaaggataaaatggtgaacaagataaacataatcctagcttctatggagtgtacattcttgcagagaagagaaatattaaaaaaaattaataattaattacatttgtagtaaatgccacaaataagtatagggtgctatatagatatacacacacatacacaaacacacatatatgtatatatagtgtatatatacatgtacatatatgtatgtatgtatatatgtgtgtatttacatgtacatatatacatacatatacgtatatatgcttatatgtatatatacacatataagtatatgtgtacatatttgaacatatgtgcatatgtgtacatatttgaacatatatgcatatgtgtacatattgaaacatatatatgcatataggtatatatgtgtatatagcaccctatattttatagaatacataattttacgtatacataattttatacatatacataattttctgtatgtatataattatggcacatagactatttgagagtaatagtacaatccaacctggtcttggttgggtaggggataaggatcatggatggctttcttgaggaagtacccactggggagcattatgtagaatatgtctatgaactgttgccatgaggactctgatgcgttcaaatgctaccttcaatgaagggaggcagcaaacaaatactcacaatagtcaccaaaatttatccaacaaagttgaagagcagagctctggagatattcaggcagagatctgtaagcaccgtatttctcccttttagcaaatctcagcatcctggaaagagacaggattcagttgggagaacacaaggaaacgtagaaagaggaagtcagttttgaatatctctggtataataccttcttttttgcaggttctggttgctccacttctctcttgttttctgtcagcctcctcgtctccccattgaatactatttttcacagaggcacctcccaagtctctgacctagagattataagtatcttatatttagaatattttcatgttgcctgggacatgtatccagtttactccatcacaaatcttcatttaattatcatgatgtttcaggcactgttctaggcactggagatgtagcagtggatacaacagatgaggtctatataagaaatatgtaaaaacttgccatgttagctagtgttagtgctacaaaagaaaataaggcagggtaacacaatagagagtaaccagagtgctagtttaaatagaatgggcaggaaaatccctctgaggagtgatattctagcaaagatctgacattattattattattatttaaatttattatactttaagttctgggatacatgtgcagaatgtgcaggtttgttacataggtatgcacgcgccatggtggtttgctgcacctatcaacctgttgtctatattaggtatttctcctaatgctatccctcccctagccccccacccccacaacaggccctggtgtgtgatgctcccttccctgtgtccacgtgttctcattgttcaactcccacttatgagtgagaacatgcagtgtttggttttctgtccttgtgatattttgctgagaatgatggtttccagcttcatccatgttcctgcaaaggacatgaactcatccttttttatggctacatagtattccatggtgtatatgagccacattttctttatccagtgtatcattgatggcattttggttggttccaagtctttgctattatgaacagtggtgcaataaacatgcgtgtacatgtgtctttgtagtagaatgatttataatcctttgggtatgtacccagtaatgggactgctgcgtcaaatggtattgctggttctaggtcattgaggaattgccacactgtcttccacaatggttgaactaatttacactcccaacaacagtgtaaaagcattcctatttctccacatcctctccagcatctgttgtttcctgactttttaatgatttctattctaactggcgtgagatggtatctcctcattgtggttttgatttgcatttctctaatgaccagtgatgatgagcttttttttcatatgtttgttggctgcataaatgtcttcttttgagaagtgtctgttcatatcctttgcccactttttgattttttttttctggtaaatttgtatacgttctttgtaaattctggatattagccctttgtcagatgggtagattgcaaaaatttttttcccattctataggttgccttttcactctgatgatagtttcttttgctgtgcagaagctctttagtttaattagatcccatttgtcagttttggcttttgttgccattgcttttggtgttttagtcatgaagtctttctccatgcctatgtcctgaatggtattgcctaggtttccttctatggtttttatgcttttaggtcttgtgtttaagtctttaatccatcctgagtcaatttttgtataaggtgtaaggaaggtgtccagtttcagtcttctgcatatggctagccagttttcccaacaccatttattaaatagggaatcctttccccattgcttttttttggtcagatttgtcaaagatcagctggttgtagatgtgtggcattatttctgaggcctctgtcctattccattggtctgtatatcggttttggtaccagtaccatgctgttgtggttaccaaagctttgtagtatagtttgaagtcaggcagcatgatgcctccagctttgtactttttgcctacgcttgtcttggctatatgggctcttttttggtttcatatgaaatttaaagtagttttttctaaatctgtgaagaaagtcaatggtagcttgaggggatagcattgaatctataaattactttgggcagtattgccattttttcaatattgattcttcctatccatgagcaagggatgttttttccaattgtttgtgtcctctttgatttccttgagcagtggtttgtagttctctttgaagaggtccttcacatcccttgtaagttgtattcctaggtattttattctctttgtagcaattgctaatgggagttcgctcatgatttggctttctgtttgtctattattggtgtataggaatgcttgtgatttttgcacattgatttttgtatcctgagactttgctgaagttgcttatcagcttaaggagatttcaggctgagacgatggggttttctaaatatacaatcatgtcatctgcaaagagagacaatttaacttcctctctttttatttgaatatcctttatttctttctcttgcctgattgccctggccaaaacttccaatactatgttgaacaggaatggcgagagagggaatccttgtcttgtgccagttttcaaagggaatgcttccagcttttgcccattcagtatgatattggccatgagtgtgtcataaatagctcttattattttgagatacattccatcaatacctagtttattgagagtttttagcatgaagggatgttgaattttattgaaggctttttctccatctattgagataatcatgtggtttacgtcattgattctgtttatgtgatggattacatttattgatttgcatatgttgaacctgccttgagtctcagggatgaagccgacttgatcatggtggagaagctttttgatgtgctgccggattcagtttgccagtattttattgaggattttcacattgatgttcatcaggatattggcctgaaattttcttttttgtgtgtgtctctgccaggttttggtattaggatgacgttggcatcataaaatgagttagggaggagttcctctttttctattgtttggaatagtttcagaaggaatagtaccagctcctctttgtacctatcacagaattcagctgtgaatccatctggtcctgggctttttttggttggtaggctattaatgactgcctcaatttcagaacttgttattggtctattcagggattcaacttcttcctggtttagttttgggagggtgtatgtatccaggaatttatccattttttctagattttctagtttatttgcatagaggtgtttatagtattctctgatggcagtttgtatttctttgccgtcaaaggtgatatcccctttatcattttttattgtttctatttgattcttctctcttttcttctttattaatctggctagcagtctatctattttgttaatcttttcaaaaaaaacagctcctggattcattgattttttgaaggggttttcgtgtctctgtctccttcagttctgatctgatcttatttatttcttgtcttctgttaccttttgcgtttgcccttgcttctcttgttcttttaattgtgatgttagggtgtcgattttggatctttcctgctttctcctgtgggcatttagtgctataaatttccctgtaaacactgctttaactgtgtcgcagagattctggtacattgtgtctttgctctcattggttgcaaagaacttatttatttctgccttaatttcattatttactcagtggtcattcaggagcaggttgttcagtttccatgtagttgtgcgcttttgagtttcttaatcctgagttctaatttgattgcactgtggtctgagagactgtttgttatgatttctgttcttttgcatttgctgaggagtgtatttatgtggtcagttttggaataagtgtgatgtggtgctgagaagaatgtgtattctgttgatttggggtggagagttctgtagatgtctattaggtctgcttggtgcagagctgagttcaagtcctgtatatccttgttaaccttctgtctcgttgatctgtctaatattgacagtggggtgttaaagtctcccagtattattgtgtgaaagtctaaatctctttgtaggtctctaagaacttgctttatgaatctgggtgctcctgtattgggtgcatatatatttaggatagttagctcttcttgttgcattgatccctttaccattatgtaattaccttctttgtctttttgggtctttgttggtttttgttgttgttattgtttttttagatggagtctcactctgtcacccaggctgcagtgcagtggcgcaatctcagctcactgcaagctccgcctcctgggttcacgccattctcctgcctcagcctcctgggtagctgggattacaggcacctgccaccacacccagctaattttttgtatttttagtagagatagggtttcatcatattagccaggatgttctctatctcctcaccttgtgatctgcccgccttggcctcccaaagtgctgggattacaggcatgagccactgcacctggctgggtctttgttggtttaaagtaggttttatcagcaactaggattgcaaccctgctttttttttttttctttccatttgcttggtaaatcttcctccatccctttattttgagcctatgtgtgtctttgcatatgagatgggtctcccgaattacagcacactgatgggtcttgactctttattcaatttgccagtctgtatcttttaattggggcatttagtccatttacaattcaggttaatattgttatgtgtgaatttgatcctgtcattatgatgctagctggttattttgcccattagttgatgcagtttctttatagtgtcgattttttttaccgtttggtatgtttttgcagtggctggtactggtttttcttttccatatttagtgcttcattcaggagctcttgtaaggcagaactggtggtgacaaaatcactcagcatttgctagtctgtaaaagagtttatttttccttcacttatgaagcttagtttagctggacatgaaactctgcgttgaaatttctttaagaatgttgaatattggctctcactctcttctggcttgtagagtttctgcagatatatccgctgttagtctgatgggcttccctttgtgggtaacctggcctttctctcttgctgcccttaacattttttccttcatttcaacattggtgattctgatgattatgtgtcttggggttgctcttcttgaggagtatctttgtggtgttttctgtatttcctgaatttgaatgttggcctgtcttgctaggttggagtagttctcctggataatatcctgaagagtgttttccaacttcattccattctccccgtcactttcaggtacaccaatcaaacataagtttggtcttttcacatagtcccatatttcttggaggctttgttctttccttttcattcttttttctgtaatcttgtctctacactttactacattaagttgatcttcaatctctgatatccttttttctgcttgatcgatttgcctattgatacttgtgtatgcttcacaaagttcttgtgctgtgtttctcagctccatcaggtcatttatattcttctctaaactggttattctagttagcaatttctctaacattttttcaaggttcttagcttccttgcattgggttagaacatgctcctttagcttggaggagtttgttattacccaccttgtgaagcctacttctgtcaattaatcatactcattctttgtccaattttgttttcttgctggcaaggagttgcgatcctttggaagagaagaggtgttctggtttttggaattttcagcctttttgcactgtttttttcctcatctttgtggatttatctacctttggtctttgatgttggtaagcttcagatggggtttctgtgtggacacctttttttgatgctgatgctgttcctttctgtttgttagttttccttctaacagtcaggcccctctgctgcaggtctgctggagtttgctagagttccactccagaccctgtttgcctgggtatcaccagcagaggctgcagaacagcaaagattgctgcctgttccttcctctggaagctttgtcccagaggggcacccaccagatgccagccgggggtctcctgtatgaggtgtctgttgatccctgctggaaggtgtctcccagtcaggaggcacggaagtcagggacccacttgaggaggcagtctgtcctttagcagagctcgagcactgtgctgggagatccgtcattctcttcagagctggcaggcaggaacatttaagtctgctgaagttgcacccacagctgccccttcccccaggtgctctgtcccaggaagatgggagttttatctataagcccctgactggggctgctgcctttctttcagagatgccctgcccagagaggaggaacctagggaggcagtctgactacagcagctttgttgaactgtagtggagtcctcccaggtcaaacttccttggcagctttgcttacactgtgaggggaaaactgcctactaaagcctcagtaatggcagacgcccctcccccaaccaagctagagcatcctaggccaacttcagactgctgtgctggcagtgagaatttcaagatggcagatcttagcttgctgggcttcatgggggtgggatccgctgacctagaccacttggctccctggcttcagccccctttccaggggagtgaacggttctgtcttgctggcattccaggtgccactggggtatggaaaaagaacttctgcatctagctcagtgtctgcccaaacagccccccagttttgtgcttgaaaccctgggcccttgtggtgtaggcacccaagggaatctcctggtctgcaggttgcgaagaccatgggaaaagcgtagtatctgggccagaatgcaccattcctcacagcacagtcagtcatggcttcccttggctaggggagggagttccctgaccccataagcttcctgggtgaggcaatgccccaccctgcttcagctcaccctccatgggctgcacccactgtctaaccagtcccagtgagatgagccaggtaccacagttggaaatgcagaaatcacctgcttctgtgttgatctcactgggagctgcatactggagctgttcctatttagccatcttaccagccaccacctattattattaagagatggggtcttgctatgttgcccagactgaaatgcagtggctattcacaggcctgatgatgactcactgcagctttgaactcctgggctcaagagattctctcacctcagcctccagagtagctgggactataggcacacaccaccatgcccagcttctgattgatgtttggattcaatgatttatttgtatattgactttttgagttggctgatcaaatgctttcctgaaatgtgtaaagtgtcttgagatggttctttaagctgctaaagatagaagaggagagagaaaaaaagaggtgaattactaatttgtggctaatatatgatgtctacaggaacagtaagctcagcgcaacccctcatgggacctcctgccacacatcttatttgtgcttgtccttcttttgaacagtatgcctacattttagagaaatcaaataattctagattctgtattaaggtagcaaatagtgtatgcttataagttataatgctattctcttcatctgctgctcagatttacttttctagtagatttttaacttatgaatttagagtgcaaaattatgagtctaataaagaaaagttaaggttacttttcatgctaattgaagtatcctttaaaaaattatatgaaggtaattaatttgtgggcaattactgaatttaatgtttgagaatttttagatgggttttcactgaagtgtttctctttgacttataggtattgctattgattgacattcaagtctcttacatcaacaccaaccatgaagacttcattggcttcgcaaagtacgtgaaacacttgatggccacatgcattcctcctgttgatttgtctcaaacacacattgtgaatttttactacagtttcaccacctttgagaatacaatctgtgccaggattaactctcagtgtgcctacttaggaagtctgagctccatggtcgtagggcagggatatttactattctctcagtaaagtagttggctctattatgcagcatatgaagtcatgtatgtcttacatacttatcatctcatcatttttggatgatgttctgcagtttgtacttgaactcctatagaaaaacagtaattaatgcatgtttaaaattttgaggggaacagtttttcacatcaatttgaaataccacatgtaatttacaggatgaaagatgtttcaacttttctaagtcagaatctagaggcctgttttttttttttttttaaactttgcgaaattagatgtaatctgtcggggtgaacattttattttctgtaaagtgtgtatacaaatattgccatttttcatatacgttatcatgcaaacgttatggttagttactcaggattggctattcactgtgtgacattttgaagaccttgaatgcactatcttttcctgcccattagtgaaaccagtttttgatttaaataatcttgatatcacctctaaaatatatttttgcatttaagtggttccaacttcaagtatataaaatatagcctattttatgtaaaatgtaaaacaaaagagcctatgtacttttacttaaactgagtattcaagaacagagacaaataaaaaaatgacagaatgtcaaattaatttattttattacattctgacttagaagaaatggatatgcagaccctgtgacctaaactaaacagtggcctgaggaatttacaggcatgttttagggagaacagtcccaattatccaactgaaaattatctcatcctaaacttggctgtggttgtgatgtcctagccaattgtgtaaatatcttttgcatccaatgacgattactagtgaagggtagataagatttcttccaccattttctgtctgtggcatacgtgtattcttgttagaacccaacgataaatatgtgccctagtctagttgtctttgcagccaccctgcccacacccacttcttgataggtatttgctgcacaggcatttcgcacagacttgccctcctctcttttagccccaagactctcaccatgtgttctgttcatttccttctgcagactcacctaaactgtaacatacatccttatccctaggtccagaaattttttccaggtttcctccacagtcagtgaactctagggagcctgtgccaagctctactctagtttctatagtgggtggggggggaatgtagaaaaagaaaaaaactttttgccttttaggagcttgccaaataattgaaaagtatagagacacacaagtaaaaatttaaactgacacattcttcattttcctcactgcttctctgaggaatttaaaagacaaacaaatccttgagacatttaaaataataggaatgctgcctttaatgttgattttcatggattacaaatgccagttaggttcttacaaaaatgtagcagatgtcgatgtaaacttgacacaataacttaaaagtgaaaaggatgctgccttgttgtggtaccacaattagagggggaaaatgtagaaaaagtcataatccatttagaaaggttcaaatttaaacatattatataacccgtgcttcaatttaaatttcacctttataatcttcttgaaactttttttttctatgataaatgagctagagtttcttttccaataaatttccatatttgctgccttagaagctgttggactatggttttatattgattatattgatttataggtttccaagggcaggtgatttttcaaatttaagactttcaaacacaatcttttgacgtagtctctctgtgtctggtcctatttttctggtccaggtgtctggtcctatttttccagcagtgagatagactatgaatctttatgatattggggagaaaaaaagaagcataggtaaaactgctttagaaagccagcaactctacacatttctcatctaatttaaattgcacacttaaaccttctttaaaggactgatctgggagtcaacaatccaggttgtttttccaggatatgccactgatgagctttgggttttggcaaggtgctcagcctttctctatctgtttactgatgtatcaaatggaataataatccttgtcttgtatacctttcaggattgtcagaagatcaaattaatcaagttatgtggaaatcctttaaaaaaaactatggtgtagtctataaatgtgagagatcctccctgtctctcactctctccacatacatgcacgtgtgcacacatacacacacatacactcacatttgattactagatgtaccattttactttatgatgtagttataatgacttaagtatgattgtcactggaatattttttagctgctaatatcattatctctaaatgtgatattttgccccaagactcagagataaatgtcctttccatttgtatgtcgacttggaattgacatggggtgacgtggagtgattatgaagatgaagaaatgttcatttcaaaatcactttgaggggttgtggtattttttgtgcttttaaaaattaaaaaaatatggttgtagctataaattttaaagttggcaagaatgctgtttccatcaaggaagaaaagtcaagccatatttgaagacaattatgtaagtatttttaagttccaaagacagaaaattaaggtctggggttgaagaaaacaagcatttgtttcatgagatttttagagagttgccaaaagggaaggaactgcctcccagatttataggatggtgatgtacatagtactttacacatgtaatttttttcaacttggatgactttttgttctaattttttaaaaaatgaaaatgaattgctaaaattggattaataaaatatttactttcagagtagcattcaggacatctcaaaattcttctttctgttatagaatttatactgtcatgtttaatatgtgacactttttttccatcttctagttatttgttagacatggcctgtaaaatatgtaccgtgtgtaatgtgtccaaataagcactgctctaggcttgctttggaatttcctggcttctaaatgttttttcaactataatatagtttctgagcctgaaagttcagcatttcagaagaaaacgtcaaatttctttgtgacttaagggttttaatttgtcattctctgctttagaaaaaaaaaaaccctaaattacatatatttttacataatatagctagtttttgctatttaagaaaataagaactggcccaattgttccttcattcacttcccctcgtcctcagtaatcctcttttgaacaaaaaggcaatcttgttagtggaatgccttgggaagtgaaatttcaaactcctctgctcttcttcatttgttccatgacacaatttgctttctgagttactaggatttatgcagtccaatggttaaagagaaagagggactatagatatgtgccgttagagtgatatctctatacaccgcaagcagcagaccaaggtctgtttgtttttcaatctgctcagtaggtctcaacacctgttttctcacagttgaaatgatacagtgtgcagatttcagttcttgttatttgagcaccatgaaaattctatgggtcttaagatttgttatatctttttcctgatcctctggaatgcctctattgccgttttactgaaggcagtgcatttcaaccttgccactaaattccagagcaatcttagtctttccctttacattcttagtttatttttccctaatgcataattatattctattgtaataatgtttctagttcctaatcttacatgagaatgttctctctcttgtggaatcaaaacttaggtattggagtataaaaagatcctttttttgacttatatgcaaatttaggaattaaatgcttggttgcttactgagattgttgtcaagtagaaatacaggattgagcaacttgaaaggataccattcacatatcctgttcaaataagttataaattccaatgttccaagcaccattttaaaaataagtagacttccagttttctctttcatcctcaaatatgttattttaaacttcatcttcatccttaacatgaatcttaggaggtaagtgattcttcttttgcagactcccaagttctgtaagattttcttgcataatagcctgagccttcattaaagatcctggaggagaaacggacattgtttcttctccctttggcttcagtctgattggacggagcctggactatcacagtgtaacctgtgataagttacactcttgggactcttgtgaagtgttcataatctttcttggataatataaaagaacagtctaaaattgctttactctgtagcaccattgcacaatagaactttctgagatgatggaactattgtataatctgtgctgttcaatacagaagccactagctgtatgtggctattgagcagttgaaatgtgggtagtgcaatgaaggcaataaatttttaatttaattcaatctaattaaagttttaatctggctaccagctactgcattggacggcagagccctacagtatagtgactccggctgatggctctgggaccttcactgtgggtcctactttattgacagcttagtggtgacctatggtggtagctactgagagaaagagcaaggaagcctcttaattgctactaaacaagtctaaaagagcttctttactctatagcactgttgcacaatagaagtttctgagatgatggaactatcgtataatctgtgctgttcagtacagaagctactacctgtatgtggctgttgagcagttgaaatgtgggtagaggtagaggcacactctgatatttgctatggaatctacatctcaaagggactctccatttccttaatgcatctgagccctctttgagtggccttagtctgtgttccattctctttttcatcttcctttcacttttcggcccactgcaatctagtttctaccactccactccactgagactgcttttgtccaggacaaaacagttaatccaatggacaattctgagcctttcatttgacaccaccgttaatcactccttcttgaagagatctgttcctttgcttcaataaccttccactctctcctggttttcctcttttcactctagccacttctcagtctttaggagctcttcatcttctgatcatggcttaagaactattctttaatcaattttccaccctagacccccttctttctcactcactgcattattcctaatggatcttacccactccaatggttttagttgccaactttatctgatgactccaaatctagatcttcatttcaagacttttcactggactatgtaccatattcagatgtctattggacatctctacttatatatcctagagaagcctcaaccttctagtcccaaactaaactcctcatctgctcttataatttttaacttctatgttgttcccactttctgtggatggcacctcccagtcctattctttgctccttgttcccctcatatctttgtctccatccatctttaccaagttcatgtgattctatctccataatattttttgaattcatctatttctttctatcatcattgccactactaaagttagtcttctcttacttgagttactacaacagtctctctgtacccctgtcatcctctttctcattccttctgagattctctgttactttcagaataaagtctaaacttattaatgtaatttccaaggctctctataatctgtatcttgtttacctcttcagcctattctattgttactattcctttctactctactccctaagtccatgctgcagccagtctgaccactttgggatccctaactgtaccatacttttgctttaacacatgcctatgatatgcttcttcaaattatttaggtttcctagtacagatgatcattgatagtctggttgtaaataaccctggcatcaaaacagaattccatacgtatttcttaagatactaccataaaccctctgctaggtaatgtcagtgatgagagaggtagaaataccaagattgatgctcttgactatcaaggagcaggcattgttggaaacccaacttacaatcttgtttataaaatacaggcacagaccaaggctttgggagtgcatgaaaaggagagataactggaggtttctaaaaaggcataattcaggcatgatgcttgattggagttttaagactggacaggactccaatagtcagagacagggggtctgggctgactgcttcctgtcttctctgcttgagtcaatactatgcatttcagggaactaatttgtactaaaacattgccttgatcatgtcacttgctggcacagaaacatggaatgttttctgctgccttcagagtaacagccaaattctccataactggccccaacgtacagttattatactagatggcttttaagatcacttacaaaccccagtctatgattggataattctaccataatagttttactctccacaacttccccatatgcctcatctttctacttcctggctttgctaataccagtctattctcttggaacgtagtcatttgttttcctttattaaagtttatcttcttttcaagtttgctacaaacagttcagatcatatcatctgaaattatatttcttgtccctgaacattcagagaaattacaatggtataggatttatttgataaatggtcacacatcatagacaaggataggacactgtgcaaaaaagttttgagccaagagataacattaggggttctctgattgtcttctaatgtactcttatttttatagaagtttaaacttcttgttatatacttttagaatcattatgtctcagcatacaccaatttggttctacgttttagtgttctggcaaagccttccacagtgacttgtgtgtagtaggaatttatatgacaaacgacaaatgtgcgtgcacacacgcacacacatatgagaagatatgggtaattatatcccacatttaaaacagaagcactttgtttttgctttctattacatcctcacatgtttattaatatggattttattttttatttgttatttttgttttgtgtatgcatatcattacttgtaccagacaaattgtaggcttttgataacaagaactataccttattcatatttttatatgctacggagttcgtgccctatagtttttgatttatgttaaactaaaacaccatacataggtatgttttataatatttcagagttaattggttaagtaactatatccaagaacatgtccaagggctcaagttaacttgcaagtccttacaggttttttaaggaacatatttttaaataaatgttttgaaatactctcagttcaattattatgcagaagaattatgagaaagaatgtattctaagcaggcagctttttttgttgttgttgcttttgaagtaacttcaagtagctaaatacatcattagcaacagaatgtttaagtttatggggccaattgctgcaaaaagattctttaggtggaaaatagaggcaacttagtgttttttctaactctaatatttgagattggcttataaagtaaatctacttttcctttggcatattcttacaagtggtagatcctaaatatgcattatttcacagatggaaactgtcaatggacattgtctttatctagtgtagcttataagcttctgagagtaattttgcatctcaaggaatattggacctaaaaggaacctaagaaacaacttgtttagtcctctagccctcctctctgtctctgtttctgtctgtctcctttatgacacacatatacacattttatagctgagcgactgaagtccattttgatcaaacttttcacctaaggtagcaaaggagtcattaacgatctttgcggcttttgctttacattcaacttcttttcccttaagtgatttgaaggggactgatacataattttagggtctacaataatttgttcaaaggaagcacctgtgggtctatcacaggttttcaccactagtcagtgtttcagtgaaaacattactcctaaaacacaattatggtgcttggaagagataaacataacctatgaaggtgtcatgatctcattataatagtagttttctcatgcattcctggaagagcaggaagcctggagggtgctggaaaagtgacatttaatgtggaaaaagaaagtaaggaggagatccgaagcccttaggagagtgctactcaagacgctgtgtgcgccagggcatgagggcagccagagggcggtgtgggcacattggatcctggttacctctttcacagcctcacctacaagacctgaataatgtagatttagattgttcagagaaatggttaaagaggaaataatttcatcgtaattaagaggattaaccatttaacagaaagctggaaaaataaaaaacaaggaaggaagaagttgaaattagcaaattttaaattggaaaaaaatatatacacaaaatatttttagcaaccaaatacagtatggcctttcaccacccaccccctgcccaccttcagttgaatgcagtgttttttcatgagtttgagtgaaggaaagcagcttaaatgtatcagaggagtttattaaaaacttattttgatcagctgttctaagtgtggtgttgatttctaacttgttactgcagcacaacatcccatcactttaaacagttgactgagagctttagtctcccttttctctattttagaccatttcattgatctccaaaacagcttccataaactattaaacaatctgtaagaatactgagtattgctgatcttcccagaataaccaaaatgagttgtgtttcttatattgatacgtgtttattcatggatccaccaaaagaaagcctttgtccttttgagggatagagtaacctagtgatgaaacgtgtgggctctgttgttaagttgttggagtcctttctggcttttaaccctctgtgcttatgtctaaaatgagggttataatggcatcaacttcattgggcttttcatcgaacagatatttcatgaaaccaaccatgtgccatgtcctttgcaggccctggggatatagcagtgaacaaaacagacgcaaacccctgctcattaggagcttacagtctaatggaaaagggcagacaaacacaaaaaataaatacaccgtgtagtgtatcggaaggtgagaaatgccagacagaaaaatcaaacagggtaaaggggatgatagtcttggaggaagggagggatgcggttataaatagggtggtcagagtagtcctaactgaaaagaaggatttgaatgaagacttgaaagagatgttgggaaccatgcagatgaaagcgggaagtacatcctagggagctagcttgcctgaaggctctaaatgggagtgtattgggtgggtttgaaaaagagcagatgccagtgtggctggaactcttcagggaacaaggtgaagggtaggaggagatgagtcaaagaggcagtagtgggggttgcttgagtagggccttgtagacccttgtatggactttggtttttaccattaaatggaatggtgttgatgcagtacacggtttcgagcagaagagttaacatagtccttctgaaagtatcactctggtgtctgttaagaatagacttcagggagacaagtgtggaagcagagaccagagaataaatgattacagtaatccagatgagggatggcagtgtcttggaccaaggtgggaccaatggaagtgatgaaaagatggttaaatgttaaatttattataagaaagtagtcgacagcattttctgatggtcggatatgggttgtgagagaaagaggagacaaagattttggccaaggaacttgaatgtatggtatagaattgccattagttaagaggaggaaggaagactgtgggtggaacagattttaggggggatttcaggagtttagttttgaaatattaagaatgatatgcccattaaatacccaagtgatgaggttaagttgttaaaaacatcaataagtccagagttgggactcatacatatttggatctacatggcagatccaaaccagagatgcattaaaggagttgtcagaatatattggaattcaaagcagtgagactggacaatatcacaaagagtttgtgatgcggagccatgctacttggtactaccacttattagctgagtgattttgggaaagtcacttagcttctctcctcatctatgaaacaagaagaataatcgtaactgcttcatggggttgctgtgagaataaaaatgattaatatcgataaagcacttagaacatggcatatactcaataatcattaacttaatttccattacaactctcctctgtacctgtgagacactgcaaatatgtcaactcgtatgttattaatgttacaatgcagcttttctttaagtggtgttattatatttttggtttatatgctactaggagttatgtgctattaggagtcccattgagttggttttgcttccagaattaaactgacctggaattttggtattaggtctgtctccattgattttttttttaaagcctgtataaattttagtatttgttacttgtttaggaaaaaattatatgtgtctcttcagtgctgctttcctttgcttttctcagtgctcagcagaggagcagtcaggttcacaagaaaaccacagttggaaatcaggtaggaattgcataagagaatcagtgtatgcatgtcccaaagaatttgaactaaatcgcttgattgactatttttttaatgcaaattaatcacgtgcaaattttgcttgaaatgcagctttcattttgatttgtttttgcttttaaaatttttggagtgaattgcatttctttttggctattttgtgcagttaaccatattgatttattttaaataacctttctgctacttgctctgcatttcaaatttgactcctcatgtcctattttgcttgcttacgttacccctaagtttaatttaacattgagtttgtgagtcagttgaaggttaaaatgtggtgagtagttgcatgagctttctggggttgctaactagttcacacatttgcacagcttggtatcagtgaagggacagctcatgaagaacgcagttgttggatgtaatctctgccacactaaattcttgttggttaatgaagatgttaattcctaagaagatctgatcttttgagtttttgtgttttgggctgaccagctgtctctgactaatagcgctctgcagagattgtattaactcaacagtttgctgtgtcttttatgttttatgtgataatgaatatttgcattgttatttcttttcaagtcaaaacaatgatggtgttatagtttttaaaaaactttcagaggtacaattattgaacaaattgaaacctctgctctagatttttttcccattgttttgaaaggagaagaggtaataacagactttattttaaaaactttttttctgaactaaagcatataattctttgctatttcagggaaccaatcttccgccttcaaggcaaattgtacgagctaagttctgtaagctttactgttgctttttcatttagcttcccaagggcacagtttgtctttaactgattaactcaactagcgcttgctactaattttttttaaacttaggttgtcttgtccgtaacaccctatcattgaaataaaaatcctcttaagagggttcatcccttcactgctaataacttgctgtgattgaaaggtatgaactagtaaactctaaaatgctgtaataataaacccttaacactgtgggtgctttgatatttctctaattttaatggtccttaaaataattaaaatcattaatgatcttcatctctgtccttttatgctatgttgttatgaggtgtaagcctttctcttccccttgtatggtaatatttccaataaatgtagatgatgcttctaaaaggtgggtaaatattgagtatctgattttgctgtgtttgttgataagcctacccaataccaattatttgcatttatttaaaaaaacagaaaagcaaagttatagtgatggacattttatatggctatagagttaaatctttgaaaaccagatactatgtcttcttttatggaagtgtaaaaacattgtcataagcatttagaaaaaaaattaaactctaatttctaccacggataaagcaggcttattcttccaactatgcacagtttgagaatgagattggagcatgggtcaattatctgccccatgatattttgggaagacacaggttttagacctagacattcctgggttcaaattctgttctgtcacttaagagctatgtggcctgggacacattgtgcctgagtttgctcagctgtgtgatgagaggaatagaaaatatctctcaggatgatggtgggattcagaaatgatatacataatgaggtttgcagcccagtaccagatatgtgccctgtaaagaatagaaacattactcccaaaagttaggtgctgtttcttcaaactcttgggagaaaaagtttaagtacaagaagattataaaatttataaaatgagaacaacaaaacacttgggaaaattagaagctatggaaattgttctgatgcctgcaatgcccagattgtggttggatatgatataaaggatttacctgtaaaagtttcctcacagtcagaagcatcgcttagctcacagaagtatgtacatgtaggaaaatcaatagtataatagcatatatgcatactttagatcagaggaaacttggaacagctttcagttatattacttccaaatgctcaaatcatgctaattgtgtttctgtgactttgcttttgctggatacttcaaagcccacacattatggaagtattacatctcaagataatagaattgggtgagtgttataatggaatatagattccttatccaaaacttctggggccagacatgccttgaaggtcagaattttttggactttattaactgtatcatatattaccctacattttgtggagttagagacagcaccatataatgaaacatattctatttctgcagtgaaacaaaggaatagttacaccaagtaaacttttaaataaaagataaatcctctcacatcagatcaggttttgctgccaaatttgctaagaaaaaagctttcaatttgcaagcaagggattatgaactagaatatattattttccagaatcaaatccaataatgtatacatgatacaatatattttaaaggatcttcagtagttcttcctacttagcagaaataaaccataatgacttgaaattttctttatgaatctgagcatatgatgttgattggggtttatatgaaaacagttttgcctattaagaggctcaaatccagggagttttggggcccacccttccgactgatgctggcttttctggttggtggggctgaaacactctgcagcatcctaggaagtgattcatccatgctgctatcctcttagggctcctggttgcagaagattgttgtgcagcatctgttctgaaatattttagaaggatttaagaagggcaaaactcttctttaaagtctaaatttgctttgtttatgtctgcctagaaattgtaatagtttcacaagttgatgtcagcaaatgtacaaaaaaatgtgagcacataatttaccgaaagctggactgctcaaaaatttaaatttaaccttcattcatccttccactcatgtattcaaaacctatctgtgtcaaaatgtgtggtgggtgtttagagaagcatgatgatgcatcaatcacaggcctcaccctcaggaagcccacagctcagcggggatgatggtaagtaagcaaactgaagtccacttccttttccaaggctagctactgctgacccttcaggtcttactgaaacatcacttctgcaagaggccagccttggtcaccagatttaaagtcaccctcccttcccaatgtctttcactatctattacattttattatttgaaacaatcttatttattcacttatttattattttttgtcttccttcattaggacgtaagacccattaaagctatttttatgttgcttaaagcagtacagaattatagtaaggttttaagcacaatcatattaacatttgtggagaaaggctttgaaggtgagacaagactggaaaaaggagattagttagaaggctgttgtggatgaaaaattgtggtgatccgggcttgggtgtttgtactgaatttgaggaaaagctgatgaattcaagagatattaagtaggaagaatccaaaaaatctgtgataaattggatgtcggagagagggctggaggttgtcttcaatgcatcaagatttatgatttaggtacaagtaagatggtgctgctcttcacagagaaaggagcatagtgaaaaagtcagattgggatccagagtcatgaaagttagctttctgagtatgagtcaccgtgggagtttgaagtaaaaatgtccagtaggaaggtggataaaagtgtttaagtccagaagtgacagagaactctttcttccaaaggtattggagactcatggaaggatttccaatagggaagggaactcaactgatttttatattagaaaggtctgtaatggaatagtttgaaggagacaaactagagatatgggaattggtgaggatgcttttgaaattattcaggtgagagaaacattggttgcaggtagtatttagcagaaggaacagattcaaaatatattcagagggtagaattggaagggttataaagagttctcagggggttaagtcatcctcctaggcttatggctaagggcatgcactgacaaagggagtgcaggagaagggggagcaggtgtaaggggagatgagagcagaaggtgctgatttagggccgggcacggtgacttatgcctgtaatcccagcactttgggaggccgaggtgggtggatcacaaggtcaagagattgagaccattctggccaacatggtgaaaccccatctctactaaaaatacaaaaattagccaggcatggtggcgagtgcctgtaatccaagcttctctggaggctgaggcaggagaatcacttgaactcaggaggcagagattgcagtgagccaagatcacaccactgcactccagcctgggtgacaaagcaagactgtctcaaaaaaaaaaagaaaaaatagaagaaggtgctgatttcaattttgaatatgtttgtgcttattggagatatcattggggtttgaggttcaggactcatgtacactggagacataagtttcactgttgtcaataaatacatggtatccgaagccgtgggagtacatgagaccacctccaaaggatgagaacatagaaaggaatgtaggacttaaagcatgatggagaaagaagaactggaactgaatggggaactgaaaaggcaaataagaagtgatgagagaggtaggaaaacttggagagtggttatcatgggaaattcagtcagatatcgggcaaaattcacccccaatatttcacataggttcttttctattttccctaaatgttggctggtctgagaaataaagggacagagtacaaaacagagaaattttaaagctgggtgtccaggggagatgtcacgtgttggcaggttctgtgatgccccctgagccgtaaaaccagcaagtttttattagtgattttcaaaagggagggagtgtacgaatagggtttgggtcacagaggtcacgtgcttcacaaggtaatagaatatcacaaggcaaatggaggcagggtgagatcacaggaccacaggaccagggtgaaattaaaattgctaatgaaatttcaggcacgcattgtcattgataacatcaggagacagggtttgagagcagacaaccggtctgaccaaaatttattaggtgggaatttcctcgtcctaataagcctgggagcgatacgggagactagggcttatttcatctctacagcttcgaccgtaaaagacagccacccccgaagcggccattttagaggcctaccctcagggacgcattctctttctcagggatgttccttgctgagaaaaagaactcagccatatttctcccatttgcttttgaaagaagagaaatatggctctgttctgcctggctcactggcagtcagagtttaaggttatctctcttgttccctgaacattgctgttatcctgttcttttttcaaggtgcccagagttcatattgttcaaacacacatgctctacaaacaatttgtgcagttaacgcaatcatcacagggtcctgaggtgacatacatcctcctcagcttacgaagatgacgggattaagagattaaagtaaagacaggcaaaggaaatcacaagggtattgattggggaagtgataagtgtccatgaaatcttcacaatttatgttcaaagactgcagtaaagacaggtgtaagaaattataaaagtattaatttggggaactaataaatgaccatgaaatcttcacaatttatgttcttctgccatggcttcagctggtccctccgttcggggtccctgactttccgcaacaagtggtagaacaaaagctaaagggagagaatgtttcaaggagggaatagtcaatagttagatgtttctaagagctcaaggaacttggaggaagttgtcagatagttggactgtggaaggtcctgtgcaggttagggactatctgagggtccagtgatagcacgaattctcttggccttgtaaattgctcttctgctctacagttggaaggtggcataaagctgaggacacagacaaatgaattgatattctgagctggtgtttttctagggaggcagcatggaaggtcaagagagaagatgagttagagtttttaagagagacaggttgaggtaaaggactgtgtaatctcacatgagtagctttaattgatgtattaatcaggatagattaaccaggtaacaagcaacctcaggatttcagtagattagcataatacaaatttaattcaccctcctataataattcaatgaaggtcatcaacatgcagggagataccttgcttcacatggtcagtaacagactgggctttggaatcccagagattccaaaatctcccttctctgccttctcctgcatagaacctgcaaatttcattcttgcagcaggtgggaaagagacagaagcctgggcaagggaggtttttaagaaccagtccataagtggcacacatcatttctatatcgttgaacagaacttggtcatttgggctcacctagctgcgtgggaaatagaaaaatatactctgagcttgtgcccaggaaaaaaaaaaagacaaaaaaagatgatgttgactgaaaattgaaaggaaatgggcaaaccagggaactggaggttttactaaaatcagaaaaagtttgtgctaggattaaggaaaagaaattatgaggtgggaggttaaagtcagtgagtggcatgttgtacttgaaagtttaagagtaaagagcatgccacctgaaagtcagagatgttattggagtaagagataacagacactggagggaggggcacaagtgataactaaaaatatttgtggaacattgtcttcggaaggtgtgagtagctgaaaacaaatggggatgaaatgtccttggttggaatatgttaggggccaggaggactgatgtggcatttacatgactgataattcattcctttgtcctcaagagtcttagcaggaaggcattgttgacatgctccttggcccgagaatgtatccaactgcaattgtataactggaaagactttttctttaagcaggaagtagagcaggtgcttgcatgagcctagatattagggtacttcttagtctcaagcttattatcagttttgtttgccatccatgtgcccactattgttctaactttagactggaatatgaaatttggcttctcaaacctacaggtctccaggtaactggattatcaaccttttgtattataggctgcaaacagaaaaagatgtttccttccaaacagggtttcttctctccctactttctgaaaactagttttagtagacactagtctttttcataggatctctcacaggtctcagaaaattataaatggacctcactatcctgaaattttcctgccatgtcccctagttcttcaacctctgtatgtacatgctttgagtccaatgttaaaaaggtgacagtttaatcagttctttaacagatggataacaaagattgccaacatcctagcctaagagagatccttccagtcctctcgcctttctccgctcagctaattccaccttttagggtctgtcactcttaactccaagtcttacctgacttcctggtaccgatatctctatcagttaggattttttcagatgtaaatttcagaaaactcaaatgaccctggaaaaaagggaatttgttagtttacatgaatgaacacttcagggatagaatcgagcactatttaatccacagctcaaatagtgtcaccatgaactagttttttttccttccatatttttgttctgctcttttgctgtggttctgttcttgccccaacggactgcaagatgactgtcatcagtctccagggaattgtcttcttactttgaatccagcagaaataagagtctttctcccaggattttcagaaaaccttctaaggttcagtctgattggactggcgtggatcatgtgcttatttctgaactattcactgtggccagagaatgaggtatactgattgacttaggccacatcatatgggacaagggatgttcctcaccagaacacatgggctgcctctccccctgaaagagctattgctggaagaagaaaggatagacgctggagaaggtgcatcacaggtgaaggcaggtacttgctgagcattatttgtcttcagaacaatctaatttggatactaggatttttgtgtatgttgtctttttaaaggaatatgagatggttaatacctcatcattaaaaccctatggttcatttattaataaaatttaattatttttccaattcatgactttccccttctctccctttccttttaaaaataattctactgactatgttaggttgagaagcaacatagtgccttggttcttcagagctgacacagtagagtcactgtgtcactatgagcaaattaattaaaccttactgtacctcagttttctaatctgtaataagctgataataatagtaactgtttcataaggtttttgtattaaatgtgataatactagttaggtacttaggtatggtgttgggtgttttacacacattagctcattaattcctctcaacaactctatgaggtaggtacccctattatctcagttttacagatgggaaaactgaggcatggagaggcaaagtaacttgcccagtcacacagatcataaatgatagcaccaggattcaaatcttaatcaccatgtttaaccacagttctaatcactgtgtttaaccacagttctaatagtttgtaaatttcatcaagcatctcattttgtagtctcaattatttatagtctcatcatttacattaatttgctttttttattacttaatttttttttttgagacagtttttctctgttgcccaggctggagtgcaatggtgtgatatcggctcaccgcaatctctgcctcccaggttcaagcaattctcctgcctcagcctcctgggcagctggaattacagatgtgtgccaccacgcctggctaatttttgtatttttagtagagacggggtttcaccatgttggccaggctggtcttgaactcttacctcaggtgatctacccacctcggcctctcaaagtgctgggattacaggtgtgagccaccacgcccggccacttaaaatttttcttaaaataaagccattagatctgaaaagaatgagctcggctttatagaaattaatctgatgaaccaaaaaactacaatggctatttgaatttgttgccattttgttttttaattctataaaaatatctccaaaggggccagtcaatagcttgtaaaatataataatcattattttattataataaaatagagattagagtttatgaaaaccacactttgtcaaatatacagcctgttaatttgttctgcgtctttgagatctagagttttatttggaatagtatttaatgtatgccacttatgttttttccccagaaaataagcagatgttctttccatatttttacagccaagttgcatcttaatggagggtttagagcataaaaaccagtgaagagattatcttatctactcaaaattactttgaaataccccttcaataggcagaatctaggttttctgctatgtttttactttgggacagtagaggcatggtcttgtttcaccagaggaagaacaactggtgaaacaaaggcatctctcctcctgcctccctccggctgccccatagctcctctctctccctccctgcttccctcttttcctccctctgtctcttttatcctctttgatgctctctgttttacaagtgtggtgtgtttgattccaagtaagcaaatgcctgtattattccaattccttggaattttgataacatttaaaaatgttaatgtttctcaccaaagatattattttattaaccactgtatagcttatttagcacaaagtatccatggagccaataaagtatccatttgttacttgtatccaaagtacataattttgaatctataattttcaagttaaacaataaatatatgaacacatttttactgtgaaaaagttgaataatgcagataaaataaatacacccttgacccccacccaatcccactcacctccatagctaccaccactgttatcattttggagtatatatacacatatatacacacacaagcacatgggtacacacccacccacacacaaagacactgtgatttaaaaaaataaaaatagacaaatattgtacatgttttgttctaaaattgtaaactctaccaaggcaaggatttttgtctcttttgcttattaatgtatccctaacaatgtctaaaagctggtgtatggtagctgctgagtaaatatgtgaagttgacctcactttattcatttaatgatatgtcttagggatttttccatgtaaattcgcagacataaaatgacaaaacttctttgtggcataatattatagtgttctacagtatggatgtgccatacttaattcacatttccctaaggataggtatttctgctgtttccagtttttccaaaacacctgaaccagttcatagacccaacaactatatatgtaagtacctcaatccccagtactggataattatattttatataatttttgataatctaacagaaataataatatattgttgttgtgatttgcattttacttattgaaagttacagaggccaggcgcggcggctcacgcctgtaatcccagcactttggggtgccaaggagggtggatcacgaggtcaggagatcgagaccatcctggccaacatagtgaaaccccatctctactaaaaatacaaaaattagctgggcgtggtggtgcatgcctgtaatttcagctactcaggaggctgaggcaggagaatcacttgaaccagggagttggaggttgcagtgagcccagatcgtgccactgcacttcagtctgggtgacagagcgagactccgtctcaaaaaaaaagttacagaccagccttatacctatttaacagactttggtatcccttctcctatgaaatgtctgatgtgtcttttgcccattttagggaaccattgtattattttcttattgatttttaggattttaaaaatagtctgggtattagttttgtttgtattatatatagtacaaatattttctgcttatctatctcttgactttcagtttttttactggatattataaaacaaaaagttataattttggcttagaatattttaaacattttatggcatttattttttatcttatattttcttccaatatttttgtggatttttatacttagctatttaaatttttgtttgtttgtttgataatcatatacttctgtcttcttaaaccacagttacttatgtctataacttaccggcgaggataaatatttttcatgcttattgaccactagtatcttctgtttagaatgagccattcatgctggtgtttatattctctttgatattttttaacttttactgatttataagagaattttgatataataattatattgaccttttatcatatttattaacaattttttaactttttcttatatagaatttaattttatttataaggttcttgaggtaaagttttaaaaaatgtttgatagtaatgtttattgttctttattctctcatttcttctactgtatttacatttagaaaggtggtacctaccttaagagcagttaagtattcatccttatgtttgtagcattttaatgcatccattattgacatttttccctgtaacctgtctgagattcgtcatggcacatggtaggaggtgaggcactaacttacagagcagagtatagaggctaagagcatagaatctgcaaagtctagttctgccacttgccagccatattaaggcaagttccttaatatctctgtttctctgtttcctcatttgcaaaaggagaatgattattgcatctacctcttagagttgttgtgaagattaaacacattaatttacataaggcactgtgtattttgtaacaactcagttactatgggctattattattttattccaaaggggctaatgtacaaatataatcatatgaacagtccatactatcaccattgatttgcaatacttctgtgattgtataataatgtcaacaataatagcataataatcatagcagttcacattcctttaaagtttactctatggctaggtattgccttgaatgtattccttacatccactcatgcagttctacagcaaccctgtgaaacagggtccagtagttttcctgttttataaatgatggtactgaagcttagaaaagttaaatagtttaccctaggtcatacaatggataagtggcagaattctggcttcagtcctggtgaaggatgaactcttaacctagagtccatatctgggttatttgtcttatccctccatctgttgatttttgtacagtgacacactttttaattattgcagcagtctgttttaataactgctaggtttttccttttattattcttttttcaaaaatgagttttgcttttgtagattacttattctttcaattgaagattaaaatcttgtcatatcccaactagagttctatttgttgattgggtatgtgtaaagcttacaaattaatatgagatgaagtctcattttttcacttgctgttttcccatccaaacagttacttgttctgtttattataattttctgttttcccccttaacttaggtaaatttatatatcttgttaaaatataaaataactggaaatactcatgttgtaattttaaataggatttttcaattatatcttctaattatttattgctacatgaaaaccattgatttttaagcatttattttgtatcactggagtttactggattctctagtagttttaaaaattcaattataatttttatttcaactgtgtagttacatcttttatttctattttcatatattattccttacagaacaatataaaatagtactggattttctaagctgctttttactttagtgggaattttttagtcttttaccatcagttttaatgttggatttttgtttaaaatatatttagtatgataaagaaataaatatgggcctgtaatcccatcactttgggaggccaaggcaggcagaccatttgaggtcaggagtttgagaccagcctgaccaacatggcaaaaccccgtctctactaaaaatacaaaaattggccatatgtggtggcatgcacctgtaatcccacttactcaggaggctgaggcaggagaattgcttgaacccagaagaaggaagttgctgtgagccgacatcgtgccactgtactccagcctgggagacagagcaagacaaagaaagagagagaaagagagaaagaaagaaagaaatttaggtgggtgggaggagggagaggatacctaatgggtactaggtttagtacctaggtgatgaaataatctatataacaaacccccatgacacaagtttccctatgtaacaaacttgcacatgtaccccggaacttaaaagtttttttaaaaaaagaaattttcaaaaaaagtaaattcttctattcctctgtatctgagattctccatcaaaaatgggcattgaatttcattgaagtgattatggtcttacatattgaataaattatgtaatttgttatattgatatacttagaaaacattcttgcttttattctataagacttatttggttattgggagtgattgtttgccattgaacgaattttcttattattcaatttaaggtaacattattcttttttttttttttttttttttttgagacggagtctcgctctgtcgcccaggccggaccgcggactgcagtggcgcaatctcggctcactgcaagctccgcttcccgggttcacgccattctcctgcctcagcctcccgagtagctgggactacaggcacccgccaccgcgcccggctaattttttgtatttttagtagagacggggtttcaccttgttagccaggatggtctcgatctcctgacctcatgatccacccgcctcggcctcccaaagtgctgggattacaggcgtgagccaccgcgcccggccggtaacattattctttataaaaaaataatgaatatgcactactattaaaatccctgttgaaagagaaatgccaccaaaattagggagaaaaaaatactgtgtactttattcctgcatatctcaatttgctaaataaaacaagaggctggttcatctgttgggagtgaggggagtaggacttacatggacatcttaagaagatggtgaaactcaatatagttactaagtggaatgtggaaaaaaaaaaagtaaaagggctttcagctgttggccagctgggagaatcaccatcagttcacaggctgagactgctgcacagggatgtcaatttcttctcttattatccggcgagaactctggatctttcaatttagccatttaagggtttagcaaaagactaattataaaacctcattgactataaaggtgtcacgagatcttttgttagtgatgatgtccatattgcagaccagaatgttcttttggaaggatgccactagttcattatcacagtgaaaatcagagtaaatagatgagacattcttgtatatatttccaatagtgctcttttgttatttttgttcattgcttctcatactgaaattaaatcctctgaaaataaatatgtcccaaattcaccatgaccaaggcaaatttcagtttctgtccccaaagcacgaatcttttcacattcagtgcaataacattacagaatttttcctgagtcagaatattccacaaaatatgagacatctttacattcttaaggtatttcaaggagtcctgtattatgtattcataaaaaagaaagcttatgttgatcagagcagtcaggcaggaggtacccggtggttaaccttctggtctccattctcactcaggactctgctgtatcttaagtctcggtgtcaaggtacctaaatgccagggcatatcaggacattttatcataaattttaaaattttgttttgtaattggataatcctattcgagaacaatcttacttttttttcctcctcagatatgtatatgtcttctaatcttagggtctcagatttatcatatagtagctctacatgtcagttcaaaattccatttgccataaatcccccaccccctagtgaagtccctccttttcttttttccctcagacatttgcaatgaccaagtctcttatagcttctgtggaaccatttttactttcccttgggagtaatttgcatggtacagcaagattgtgatttaattggagtagtcttagtagcttgaaagagttaatgcaggtctcagatgtatctgaataattctggaaagagcaaaatggtttatttgcctagcaatatatattttctaattatgtaagtgcagaaaataagtaaaatttaagagataatctcttgaaaaaatgtaaacatgtggagcattcactaattagggaatgaaatgtcttactcccaaagttactatgaaatttctttgactcagcaaccaatccattccccaccccagggaattccatcaggctgaattatatgggatgaatgttccctatccaggaaatgagtgccctggttttataattgaacctcagttccttgaagctttgcactgtacacttgccttaccaaataattggctgaagtttttgtcctgattcttggtaaggttatttacacacttagcctgtgatggatggcccctgtgggcagattattagctgtactaccatttgtattgcctggatggagaactactttggaaatggtgaacaaaaataaaataagcttgggaaataaaaatattaatactaaatatagtcatcataatttaaacaatttctaatgcctataattattatttgtttgcactataatatgaattctttatggagttttgccatctccagccccttttctaagttttaatttgagtctcaattgacttttgtcttttataagaaagtacgattataacaaaaaccttagtttaatatcgagtcattttattgtttccttacctagtctactaaaactgattttcttaataaagctatggaatttttagcatatatattttattctcttcaaacatctctttcttttccagcaactctgttcttcctgttgacctgctgtaaaaagtggaggaggaaaagggaaaaggaggatttgtttttgggaactcaactatctataaatgacttcctcttgtttggtacatccacttgcagcatttcattttcaaatgcctggtcgcaggatccatgtcctggaggaaggaaccatgtcatccttcactcatcctgtgcacatagcctgaccactgctccaaatattatctcctataacttctggcatttcttgtgcgtctcctcttcctggagttcataattcatgtcactgatttccggtgcatgcagagtcaggttttagaaatatgagacaattttaaaattacagatgcaaagcctcgctgtttgagccaacatctgcaactagtttacgggattaacaaaatagctgctctggatgactgatatttaccagggcctctccatttcccatcagaaatcagaatgcctgttacttatatgttctttagttttcaatggaaatcaggaattcatctgttacatactttactttattaagtttcctcctggagtatcttgagttacagccaattttcagttagccatcattaagcagcttgggaagaatatgggtaattaaaatccacaaataattaaaagactgactttaaccaggagctccaacactctaccctgagacattctgctgaaattacaaacaagtcaaacagttaatgtgttgttctttgttttgttttggtgcaaacaaaaaaaattctgaacctgttactcctcagctttcaaccattcagaaatactcctttacatataagataaagttctaacattcattattcattccctcttttctccctgttccttctcttgcccctgacactcctgaattctgtgttccaggtctccagtcagcttcaatagctcaggctctttctctgttcttcttttccattattgccaaaacatcatttcatttatcagtttaaatagcactttcttaggagtacttttccggacttctacactattttcagtcctcaactgcatgttcccatagaaatacatactcctctcaccacagttttgtatatctacttgtttaatgtccatctccccaatttgactatatgctcagttagatcagggacagtagttgccattttcactgccatattctgtgtgtctaacatagaatccgcttataaatatccaacaagtaactgttgaatgaaagaattaaatattttaaaatctggaattaaatcaccagctacataaatgttctataaaataatgactcaaactgtgacattaacatccaaaagggagactctaaaatatattaaagctgcttattaattttggacattactttctgtcattcaaaggaaaaaaggtattttaaatttaattgtcattgcaggtgtgactatttcagttttccatctaaataaatatgtcaccacaacaattgttacatgtaggttgggtgcagttgctcatgcctgtaatcctagcactttgaaagggtgaggcaggtggattgcttgagcccaggagttggagacaagcctgggcaacatgacaaaatcctgtctctacgaaagatacaaaaattagctggacaaggtggcatgcgcctttagtgtcagctactcaggaggctaatgtggaaggatcccctgagccggggagatcgaggttgcagtaagctgaaattgtgccagggcactccagcctgagtgacagaatgagaccttgtctcaaaaaaataaaattaaattaaatacgtgtagctctgaaatatgattctgaacatagtaaattctaatctaataaagaaactgatttaagcttgattaacaattagagcaaaccactgaattatgacttatattaaaaccctagcagatgctattgttgctttagatgggagagattttcctttatcatccttgacctcccagacattgtgacaatacaataagactgctacatgtttacagtagcccttggtgttgatattgcccttgatttagaaccatggtaccaataatttattgactaatctgtgatctagggaaggtataagtatttggtattccaaaggagtataaagcacagttgatctctacttgataataatatcagcccttcactgatgccagacattctattgagtactttatatacattcatctcacttagtatttacaaaatctatttgaatttaggattattagttccaattcttagttgacaataaatgaggcttggctatattaagtaagttgcctaagttcacatagctagtaaatggcagaactgacctaaaagcccagaaagtctatgctttgaacgaataagctgtaatcttattgggaaaatgggagcacagcaaacacagtggcgagtaattcaaaacaaggtgatgtaagtgctaaactcagatagtgaacagagtagatagaagaaagagagccacatgggctaccagagcttctttatttgttaaaatagtataatagatggactcctttttttttttaatcttagaatgttactttcaatttagccatttaagggttttgcaaaggacaaattataaaacttcattgactacaaaggtgtcacgagatcttttgttggtgatgatgtccatattgcataccagaagattcttttggaaggattgcccagaaactgctctacgtatttatacttctacctgtcattctctggaatatttgatattttaataatcataataatagctataatttattgcatgggtgttttatatcaggcagtgtgttaggtgctttgttcttcaaaataaccttgcagagcatatactcttatcttcatttcgatggataataataaaaatagctgatatgattaagcatttcttacataccagccttgtggtaagcacttgacattcattattttccttaatcttcacaacgaccttatggtctaggtagcaacggtttcatgactgaggtaactggggcacagagaggttggataacttgtctggggtgacacatgtagtatgtggtagagctaggatttaaactcatgaagtccagcaccagagctggggctcacaattgtttgcttccactctggtttctccaaggccacgtgactaatatggtggagctagggatcaactacaaagtcttggccctttccactcattggtactcttttgactcttaaatctgagtgattctttcatcacagtgaccctggccctgaacctcttcagtctttccattttccagtatgtgccattcctgaaaacataaccaattcctgaatgtcaaaggaattgctttttttccagtgataaaaatctgtagtgatatctgtctttttatccctgaaaacagaggggagaatttaatagcataggcctggagcttgagatgagtttggggccccacttgccacttgtaagctgaatcattcacatcataaggttgagtcgctctatgcctcacagtgttcaaagataaaagaggaagagcagtgtgaatctcatagggttgttgagaagattagtgagacatccatgtaaagtgcacactgcttatagtaaatattcattaagggttagcaaccatttttattattgcaattaataaagttgtccttttgaattctcagaattgtaccagtaaactttaacttaaccagtagttctcatggctcctctaatttaataacgttagcagtttaaagtagtcctcagggttataattaatgccttatttatttactgaatgtggggtatttactgaaagtatagtttgatgattaaaggtaaatagggtttccttagtgaaagatttgtcttgatgagataagaaagtcaaattggaaagaagtaaaaaattatattcagaaaataaactccaagaatgaccactgttattttaaattttatcttggtaacgttaacattccttaacttcctgctatgtgtgaggccctgttctatggattccctcatttaattttcaccacaattctataaggggatatactattattagctctttctgccactcccccacttttttacaattgaggaacagatgtactcaaagaaactcaggaagtcggagttcgagatcagcctggccgacatggtgaaaccccatctctactagaaatacaaaaaaattagtcgggcctggtggcgggtgcctgtaatcccagctacttgggaggctgaggcaggagaatcacttgaacctggggggcggaggttgcggtgagctgagattgcaccattgcactccagcctgggcaacaagagcaaaactctgtctcaaaaaaaaaaaaaaaaaaaaaaaacaactcaggaagtccatgttttcttaacgtaaatttttactttcctggcatcaaaaattggtcttgacaaaagtgcccaaagcgtttacacaaaattttacagcacatcctgcatcgtgtggcatcagctgtgagttatcccttttgtgttgtcaatcacattttaattccctgataggccaatctcaatcacaaatttattgtgagtgtcttttcttcttaaataatctgatgcaaagaggcaaataatactgcctactgcctagaaaagggattttgacattatttcctgatttaatttcctatgtattgaatcgatgccagacactcttctgggggtggggtggtaaataagacagattaagttctcactctctcatgaagcttatattttagtggtggaaaagatagaaaatgaacaacaaaaagacaaatgagcaagaagaaattgtacatattttcagtgtagagaattaaaattggttgctatgaggaaaagtgaagatggaggggcagtgtggagagaggtaataggagaacctctctgaagagggatggtataaggtgagttctgcatgacaagtcgtggctaaccatgcaaaggtcagaaggtagagtcttgccagaaggtacagcaaggactagaaagaacttgcatgttgtagaaaccaaaagatagccagtgcggctgaaacatgtggcaaagagtggaaagagattaggctgggtgttctaagacactttctgtttttagtgtggatattgagatgtaggtgatcacttctacctgtttcgtactcttcataaaggttcttccattacagaatctctaagactctatatacttatgtacctgccctacccagcaatttggcaagagtacaaaggaaataaggtatcccaatttatctaatgaatgagatcctttcctcttccatgcacttgtgccttttgttccctgtactaacacttacttatataatgctatattctggagtaatggttacaagtactgtttagtgctctgtgcattctcatttgtcctccaacagtaggtactactatcctcatttatggatgggaagattgaggctccgagaggttaaggatcatgctctagagggatggagctgggtgtagatgaccctggagacttgctacctccttaggagtgttgcttattttacagtatgcataagttttatgccacatgtgaggctacgggcatcttgaagtcagtccaaaattttatcttttataatcttcatgccatgtactatctagtaactatgataaagatgttaaaaatgttgttggcaggatgaaaatatttgattaagaaatgacactaaaattatccccatcaaaattatcttcatcttctcaagagaatataccaaggaaagaaacagattgtttaccttacatttgtatccatatgaaacatacagtcttttcattgtctgggagtctgtccacaccacagtaacaaaaaaagtgcaggttgtatatttggtgctggagatagaaaggtgttagataatattcctgtcctccaagggcatggcatctagtcctgcagagagctctcattccttttttcccctctcataccacatctcctttccaatagcaaatcctgtcatctggaatctgaccacttctctctctgcccattaccaccaccctgctcaaagctccatcatctctcacctgggttattggcctccctcctgcttctcctctttctcttgtgagtctctcccctcagcagccagaaagcattctttaaaacagtgagatcatattacttccctgttcaaaaccctctagtgatttccatcctactgagaatcaaatctaaaggtctccaatgactgttaaggtctatgggatccgtctcctccagcctctctgatccaagttcctaaggctcctccccctctcgctcactgggatcaggcaattggcttccttggtgttcctgcctcaggacttttgtacttattcactgttccctcttcccggaattcattcccctcctccatcctgttacaccaacacaatccacatgctctttaaattccttcaggtctctgctgaaatgttattttattgaagaggcctttcctgattaagtgaaaaacatcattttctctccaacataaaccaagagcatgcattatctcacttagattgcttcgttttttcacagtatttatcatctccagatatataattatatggttattgtctattgctgaactctaaccacaactctaccccaactggagaatataggttctagtgcctagaataaaaaaaaaataggtactcaattaacgtagtaagtattcaataaccatctattcaacggatggatggatggatggatcttctatctctggctaatatttagactcagcttatctttggctctaaaaaggtagcacttgctatgtaaatagtgttctgataatattaatgaaatatcagttctttcttgttggattgtgtatatcagaagctgtaggaagaagcatacctacatgcatcttcccctttttcaatttgtgtcattatcttgttcttgtattgtgctgcctgtggatggcattctgtctggatggatgtgtctttttcacacacatatgatcattctaaagagaccccacaggaggttctcacatgcctgctctttgcttcccttgttcactgacttctgcactcatcatccccctatttccttgcactgctgtagacctggttgttttctgagacagtccctatccagtattcttttctcacattccacatttggtgcgaatccaaagccagtccagcatggagtggacaggtggtgttggggagggggaacagggaaaggcagaggagaagcaaagctccaatggagattcccttctttctcccatagctgaggaccctgtattctcaagggtagccacctcagctctatgaaccaactgtttttggaagtacatctggaacactttgggatattaaaatagggctttgtggtcaaacttggagttggtaagcaaagttaaaaggtgtgtttatcttgatacttctcagcatttttaatagaagaatgtgcattgtgtacgtgagagaagaccgtatggtattgcaggaatttcataacttttttagtcatgaaaacttttttcatggaatgtctctcttaaatagcatttcttagaacgtactttgagaaaccctgcctcaaccccatcagttacttaaaagtcttcactgggccggacgtggtggttcccgcttgtattcccatcactttgggaggctgaggtgggcggatcacctgaggttgggagtttgagaccagcctaaccaacatggagaaaccctgtctctactaaaaatacaaaattagccaggcatggtggtgcatgcttgtaatcccagctacttgggaggctgagacaggagaattgcttgaacctaggaggcagaggttgtggtgagctgagatcatgccattgcactccagcctgggcaacaagagcaaaactccatctcaaaaaaaaaaaaaagtcttcactgaggcctaagccttctctctattttagaataccagaatggcggcatttttttttaaaatgtgcatggctcttatatttagtctttgtgactgatatggtttgactgtgtctccatgcaaatctcaccctgaattgtatctctcagaattcccacgtgtggtgggagggacccagggggaggtaattgaatcattggggccagtctttcccgtcctattctcatgatagtgagtaagtctctcaaaatctgatgggtttatcaggggtttctgcttttgcttcttcctcatttttttctcgcagccaccgtgtaagaagtgcctttcatctcccaccatgattctgaggccttcccagccatgtggaactgtaagtccatttaaacctctttttcgtcctagtcttaggtatgtttttatcagcagtgtgaaaatggactaatagtgaatcagggtcccacaagtatcatctttaatctttctctgaaagctgaattgtattggaagtggagagaggagaaagaggttgtttttaggaatgagctcttttattttgacccctagtaattactagcaggtaaatccttagaagcactgaaaaaggtagtgatacataagggcaagttagaagttgtgaagtgtgttctcttgcttggtaagaagaaagacaactgggtcatacataagagattgtggcactgaacaggggagttggtaagccactcctcgggacctcaagactaaagtgcacagggctaaccaaactgacaggaaagtatgtttgtggtttgcacaaggtgaaagccccagttacccacagctatgtgcttaatggtgtctatatcctcacatcctgcactgccaaaatccacagaacaatcaaaggtgaggaaggaaggtccttgattccttcacattggaagagatttaaaactaggattccacattagatacatgcatgcatttttccctagaacattagtatttatggtagtgggttctctatgaaggattggctactaacacttatttaatacctgagtgtgtgagcatctccttagtaatactattggtactctttttcagaggtatgatagggtaaataaatttttctagaatgtcttaggaacccaaaaccttaaaatttgtcagccattctcattacttgacattgacaaattgctctatagctttaatttgaatgattgaatgatagcacatcttgttgcttccctttagggatcaaaatttccaggaagtcttttaaaactgattctctgtttgatatgttttcttcattggccaattcttgttttgttttgttttttcttcttttgcaattttggaagattttttttttctgcatctggaagatgctgagaaagtattgattcaccatatgaaatcagacttacatgggaaaatttcacctctgtcacccacccgttccactctcgagctccccatctccatcaagccacagcaacaactcttagtgacgtttcccagccagcaggcatcaggagagccagagtggtttttctcatatttaatgctttcaaaccagtcacagctggctgctcctgcaagtgcccatctctcatcagagatgctgaagctcctctctgagtccctcaatcctcccctctgtccagagattaaagacaaaggcctggcacagaagggagcctttggtaccctgctttagcactgtgaccccatcacctttggggattggtcaggctgatgtcatactagttgttaatttttttttttttttttgagacagagtttcactcttgttgcccaggctggagtacaatggagcaatcttggctcaccacaacctccgcctcccgggttcaagcgattcttctgcctcagcctcctgagtagctgggattacaggcatgcaccaccacacccagttaattttgtatttttagtagagatggggtttatccatattggtgaggctggtctcgaactcctgacttcaggtggtccgcccgcctcagtctcccaaagtgctaggattacaggtgtgagccaccacacctggccagttgttaaatatttttaatattctctcttcagtaaccttaaaaccagtgaaaaaaattttacgtttgaccttacagtggcatttgacctttgacctttcaatcttttcacctttacgtttgacctttcaatcctttcgccttattgagacattctctttcattcatttttgtagtattctctgttctctctctcttctagccccgcctcggtttccttcatgggtccatcctctcctcccagacattgcacgttggctttcctcagcgctcagtcctgggccctcttctcttctcacccaaatgctcattttaagtcatttttttcacacccacagttttatttacacctgcaaacaacaattcacaaatttgcacatctgatccagacatctttacagccaatgatctatttcacatgttcacatcttgacatgtccagactgaacttatgactcctccactccctaaacatagtcctcctactctctgtccatgaatgtgcctcaacagtctgtttagtttcttaaacgtagacctcgggagtcatcttcgacacccctttctctcccatcttccatatccaatttatcattgtcatactaacttctcttcctaaatattcttcaaatctgtccacttctccatatgttcatttctaaaactttggtcaaagttatcatcatttttaatgtcggattctgcaatagtcaactatcaatcaccctgtatcctttttcctctctcgaatctcttcaccaacccagagctagaagagaacttttcatgtgcaaatatgtattagtctgttctcacactgctaataaagatatacctgagacttggtaaattacaaagaaaaagaggtttaatggactcatgttctacgtggctggggaggccttcacaatcatgatagaaggcaaatgaggttcaaagtcacatggtggcaggcaagagagagcatgtgtaggggacctcccctttataaaaccatcagatctcatgagacttattcactatcaggagaacagcatgggaaagacccacccctcatgattcaattacctcccactgagtctctcccatgacatgtgggaattatgggagctacaattcaagatgaaatttgcatggggacagagccaaaccatgtcaaaatctcatattgttaccctactttaaacacttgaaagccttcccatttctctcaggataaggaccaaatttcttcacataaattacatgactaagtgttgtttgctcctccaggcacgcctggtaggaggctcactcttgctttaggtagagtggccacactgagtttgcctctccctctcccactcctgccccacacatcctttagatttcagctcaagtgctgaatactataagtatgccttttcttatacccggtgcaggtgagagcactgttcatgtaaggaaccacttcttggcagcaccaaccagagttataactttacatttatctgtgtgagactttgtttagtgcctattctctcacttgtctataagctccatggaggttggggactgtgcctttgtgtgtgtgtgttactgtttccttggtttattcttgtatttccagtgtgccctctgacacctctaaggtgctcactaactttctattaaatcgttaataaatatttactaaggtgttttttttcttcctctgttaaataagctctctggattatttttagtaaacatccacattttattcaggccttgataattatgaggtattttttcctcatgtgtgcatatttttgtccttgaatgtgagaaatagatgacaggcttagttctcattctgttttgtatcatttggaatcccttccacatggagggcctattaacttcaaaggaagctctgcacatgggaaagatacacaggaaaaaagtgaaaaaaactagagccctgattttcatcatggttaatggcctggatcttatagtggtttaggtgagtaaactctgagaataaacagctcactcttagtgaactcttagaaataactgtacatgtggcagaaataatgcatatgcaggcatttgagcaaattctgggaagcaataagaagagaaaaacatctttagaaataattttaagaatcaagatagtgcggaagcctagtaagccacagaggcataaaaaatgccctcattatgtgagcatgggctaatgttttggaagcgaagctcagtgagaagaggtttctggtgcttttgcagggcagaatgagtagacgatgatgaaggcactgtagacatagtcattgtagacttgggaagtccagaaaaaagtgagaaagggactccttcagttgcatgatgaagttcttctgcgaaacagtaacttggagttctgtttaatttataaaatctttgttagttggttacaatttaaacttatgcctgtgttattaggtaggggttgggatttacagaggaaccagggaaacagaaagttattaattttttggcagctgtattttaaaaagtgggggtttgatatgaatattaaatattggttccttattttcaatcagtttttattgaacactattaatgttttcagtcaatccagtcagttccttatttaaaacagtcaggcttctttcatcacagtgatttcccatatactacttcagaatgctttctttttatgttgtgctgttaggttatttcactactaggttgcttataatctgtttcagttttttcaaacatgctgtgttcattatacattaaagggaatctcaagaaattgcctcttttaaacaagcaataatgtgatgccaacttacttttttaatcacatgagtattataggaaaataggaaaaatacagggaaatggaaggaggaaataaatagaactttgtgttttaccatcaagtttcaatcataggtaacattttgatatatattacaattttttccctgtccttacaataacaaatataactgaaataatagcatacatataatactaataggtactaatctaaatcctttacatatattaactcatatgattctcataacaactctacattataggtattattattattccatgttacctatgaagaaattgaagcaaagggagtttgttccttttaactgacccaatgtcacccaggcagcaactattgaaaccaggagccaatcccaggtagtctgactctagggtcctgcccactattagcacaccctggcaaaaatatttttcccacatcatgtactaggcatttttgtttagcttaatttaacatcagaggattatgccacaacctgttaatcagtttcctgttaggaaaatggattgcttccaattgcttgccattagatgccatactgtagccaacatcgttgtatgtgtgtgcgttaagggtgggggctctgaaatcagtccactagagaggttttattttattcaactgctgaatcctctaagcgtgctctgcaaattggagtaaaatggcaaacagtgcagaaactcctacaaggaagacctgtttattacaaacatggatttgtcagttaaatagaagtacaatctcattttcctcacctatcggggaggaaaatgttccttccctcacagaattattatgtggattaaaagaaataatgtgtgtgaagctcttagcatagtgcttggcaccgagtaatatttagtaaatgttagccattgttactattcctgaatttctaaaaatggagtcaaattattatattctttgcctattttagatacttaggaaactctcatttcctagaaggttaaaaccaggaagtaacatccaaatgtaaaaaagtcacttagccaattcattcgtattagtaacaattgattttgtagagtcttgtagagtcttgaaaacaaagaaaaacaatctttcatcaaatatttgattattttgtgtctcaatttcactattctttaaatcccttcatatatacttcatcttattttcttgttttcacaacttctttatctctgtcatagcattagttcatcagatgtgaaaatctattttctaccatatagctggccacttacaagtcacacctgggcatatttgtggtggccctcacttgtgtttctggggccagggcacctggcacagtacctgatccatcataggcattcaggaaatactggatgactgactgataagtgtcttaggtgagagagacttttgaacactttcctgaattgaacttgtccctgaaaactgcaggcatgacccccttccttccactgttagagcatacaccctctgtgggcaggcgagttcccttgatgaatgggggcaagaatggcagaaagataggcccaggactacacttccctttttgtccatccagatcaatgtgagaagtcactttactcctcctggggaggactgagtgaggaaacaacaagagtgcctctccattcctcaaccctcagcggtattgctccatcttctcccaccttttattccattgagtttaatccttattctggtggccaaccagggctgtggctatccctctttgaggtaagaagtcaaagctctatcagttctgcttctaccttcttgatatcactcccccaaagctaatcatggctcctatgggcatcctcttagcaccactagtggacagaaagttctgagaggggtcaaagcagtgcatttgtagagtccacttcaaggccagcctatgtacaaggttacacgtttgctccttatttcttgtttcaaattatgttcagacatgctgtttctatagcttatcagaaattctgcaatgatcaaatgaaataatatacattaataataaaatatcaacaaactagacatgggaattttgtgagccccctcctcaatgtgaatatgaatcctctcctactgtgaagttcctagatacaaaagttcaagaattacattcccaaaggtgtttttaagaagttagctttgccaccatgcatttaccgtcaagggggaaagccatctatgtgcatactcttggagaaggacacttgaaacatggccgtctattgcaaaattcaggaatttgcagggaccacagctccagttacccaccaggatattttttagttgccttccttttccatacagcatattcaaaacctcctaatttttactttcctttttcctttgcatttctcctcctgcctcctgttacaaaatttactggtctaagaagcctaggcttcctgaggagacattctcccctctatctcattaatccagagccagctggaaagcatgtgcttaggagaagagtgagtggggtgggagagacccttaagtctgtaaataagccacaccagttaaggttagctctccacagttcccttcttgccctggcccagagcacggaatggcactgatggcagctgatctaacccttccttcctaggcctggctctgacaggttaatactagaacctatagagtgcattgtggtatgtacagacctcagctaccttatagtataaaattaggaaatctagttcacctctcgaggcctgccaggcctgtaaatgggaagactcttttccctatagttaaatccctgtctcaggcatgccttagaaacgagtctgctagccaaattcaaggacaagtaacctgtatcctgaggatgcctgtgctcgcaaaggtagatctttcctaaccaactgggtgactggactgtccattgccttcgaggagcccatgcagctccccagcatttggccaggtaggctccaaggtatgtgaactacctttatagaagcagctgcttatctactgagaaagcctagttataagcttttgtaatctaccaagatcaaactatctaacggtgcatggattataacctttatctaggctgcagcagttaaaaaaaaagacagctgcatagctgaaaaaaacttgcatggtcgaccataagtgagatcaaggtcaaaccccctgctcacagggttcaagaccttggccacactagaagtcttccacatgtacttttgtcttcccatgattttattccttgtctctgtattgattttatgatccagtatgtcagccagatgttggggtctgaacttacccgtaacatacaggttttgctgaccttgacaaaatctgttttctcatagcatggaggaaactaacagaacacatattctcttagggtaggctaatcaccaagagaagaggctgggctgttccactcttcccattgctggtcttgcagttgctttcaaagttttcctatttggcaaaagaagcttgggtgatatttatgggcaataaatttaaaaaaaacagtttgtctcctgctgaacaaatgagaacatgcccttttagctctcaaggtcctttctagtcatgtaattatgggtttgcttgttcttgtttactcgaatactcaaaacagaatttgatattcaaatactaagaagatgtaagtggctgttgtagtggacattaatagatttattttggcagttttaaatttgaatataaaattaacattttatattttctctttctctgtgaagggcttctaccactaatcctatttgtcttggcattcttttcaaattttatttagtctttgacttctgttcccacttactttcctttttcttttctttttattaatttccccttattggtcttactccttgtggtctgaccatttttcctgaatgtctgccttttcttatctcattccactgttttactttgattttgcagcttctttccctcaattccttagtgaaaagtacattaggaattgttctttctaaaatcctattttgagctgattgttatcagaaaaacaagtccatttgtgaaaaatgtgcttcctttattgtaaaagaaagggctgggattggactactgcttcttaacctttttatgatggcagcttaattgctgacaacatccagtgctgaactcacttccatgggtaactggtaagagatgtgggtcatgtttcttcacaacatggcagctgtaatcttctttttcccttcaaattagaaagcatattgcattgcaagtgatataatgtcatagggataatcttaaatatattctaattatttgtatgtccattctttgaaaattttaactgttattagtaaaatttttaaatttttaaattaaaattagcaaaataattgtcctgtagctcagttgactaaatccactggactaaatgatgtttaataaatatccttttcagctacattaaatgcttctagaaatagtggtgcatctttgaggaatgaatctaatggtgccagtaagatcaggcaatttatttagcatcacatcagcttaaactctgaaaactccattcttgtcttcgtttacacggtacctgctttttttttttgacttcattggactcttattccttttatcttctcattttctacctctccagtggcacctcctgaccttatttctctgcttgacctagattgaatggatgatcacctgaattactctcttgcctaaaaccttcaacatcgttacacttctgtacttaggtcacccggattcagaaactcagaaccctggatcaattcccatttatcatcttattttctacatcacgtgtgcaaagtgctgctggaaaagagaacacaattacgctgattgtgtccctgaaagtttgttctttgttctcagctttcagccatttaagaaaatgaattctagttgtacccactctcactcaactactggttgcctcaatatcactaccttcaagcctcccttccaacttcatactctcactctcccagataattttgtctgctttgtcaacagaaatggcaagatcaaatataaccttcctaaacttcctactctgctcctcacgaaggacttacgtccacccttactctctcaacctccccggcctcacaagatgaggcagctttattcctattcaaggctagacccttctctttgctgttcatgttatccactcctatctttgtccttgtatcctctttattgtatcgccaatctcttactctctacttattattattattattattattattattattattattattgaggcagagtctctctctgttgcccaggcgggagtacagtggtgcgatcttggctcactgcaacctctgcctcctgtgttcgagtgattctcctacctcagcctcccaagtagcttgggactacaggcacccgccagcatgctgggctaattttttgtattttttgtagagatagggtttcaccatgttatccaggatggtctcgatcccctgacctcgtgatacacccacctcagcctcccaaagtgctaggattacaggtgtcagcaccgtgctcggccctctctactaattatgaatcaataaacatgctcaattgttgcccatgctaaagaaagaaagaaaggaaagagagaaagaaagaaacctaaaacaaaacagctatcactaccatcacctcctttgaccctgtgacctattctggttttaactgtcttcctctgggaagagctctccccagtcactgtctccattttttgtttcccattcacttttcgacccaaagaactctgactccttgtcccaccaccacactggcatagctaaagacactgtgatgtctgcattgtactgtcatatccctttcttgctgaatttgacacttccaacctcatactccttgaaattcaccttggctttggcttccatgatcttattgcttttgtttctctgacattcctttacagactcttgtgactacctctgaaatgttgatatttccccgaggattccatcttgaaccactgctattttgcttggagttttaccgctaccagtgtttgtgctgaggacttgcaagtctatacctccatcctaatctcttccttttgcttcagaggtcagatcacactccatctgtgtttcctacagctacctcaaagtcagcatagcctttgctgaatttgtcaactcctccagtttcccaaactgggtctttttcctctattccttctgaattttagaatggttggttttaaaagttggtagctgcgatagtttcagaatcattctaaaacagcacacagttcaataaaaatataatgtaagctacatatgtaattaaaaaatttctgatagccacattaaaaaacaaaaggaaacatgaaattaatttttacaatgaattttatttagcccaatatatgtaaaatacattttgacatgcaataattgttttaaattaatgagatattttacattattttttgtattaagttttcaaaattcagtgtttatttgaacacttatggcacatcttaatggaaactagtcaatagggctcaaccaccatatgtggttagtggctaccggctacactatcacctacttctgtctttccccctcactaatcccactctcattcactcataaatcctgttgattttacctcctagatatttcttcagtaggttcatttccttttaactttatacatcatggctttaattcatatcctggccatatttcacttgggttattgcaatgggttttataacctagtttctctgttccagggagcatgcaagatccattgaaacgcaggtactatagtaagatatctactgatacgtagttttaacgagaaaataagaaagctcagattcatatttaatatttatttattatacatactgatgccagcacccttgctctgcatctctgatacaatgaaataactagtatattttcattgagtggtatgattagcatgctacttgtaagccctggtagggtgggtaatggtcttagtgtgaaataatttaaccagctccttcttactcaaaactattaaatagatgtgatcatttactctatggaaaataaagtttgattgtatgtgtgcatgcacgggcttcaagcttcattgtgaataagaatcaccttggcaacatatttaaatgtagatttttgggtttcatatatatacattctcattcatttggaatggtaggtggcccaggaatctgtatttttataaagcatttgaatgattgtaatataactggtagaaaccatactgtattagtctgtcttcatgctgctgataaagacatacccgagactgggaagaaaaagaaaaagaggtttaatggacttacagttccacatggctggggaggcctcacaatcatggtggaaggcaaagagagacaagtcacgtcttacatggatggcagcagacaaaaagagagcttgtgcagggaaacttccatttttattccatcaggtcttgtgagactcatttactatcacgagaacagtgcaggaaagatcttcccccataattcagttacctcccaccagtttcctcccatgacacatgggaattgtgggagttaaaagttaagatgagatttgggtggggacatagctaaactatatcactatactatactatcactatactttgagtattagtctgttctttgtgaagtagagagttaaaaagccgtggagaaaagtgcattagcccagactggagagggatgctaaatgggggttataaaagcaacagcacactgaaatggaaattgggcaccaaggcaatgctgaaacagggaatcaagggtgacaggggctggaaatatggagagaggcttggaagacagtgatgagaaccgtggtctattccataattttctctgggattggccttccttcttcaactagaaaagttaatagcaatataaaaatgaaatctgattattagggtattttcatcttcctttagtaacttacattcattagtttttcaataagtaatttttaaacatttcaggatgtcaacatattgaggaatttcagtgtaggacagtttttgaccttagaacaatatcatccaattgcatttagcatttcatttctagttctgtgacaacaaaattatcttgtatagaggacatggtaaatgatgccctctggataacagaatttaacttcacaataactctgaggggaaaaaaacctcacatttttccttaaattatataaatacttatctataaataatttctgttaaatctataatccaagttgttaatattttaaaacttaaaacctgtttaaaaaattttatgaagatgctacatgttttgtaatatggtagagaacaaccagaagatttaaacttcataggtttaaaattttacaatatgctgttcaaattataaattaagactattaaaaactccaaacttttcattttagtttattattttatctttctccttcagtcagccttatttaggactaacaaggggctaactgattgaattgagtttcttcttttcgtcatttgctggcaggtctctggtggaaatcctaatgggctgcaaactaggcaaacaaatgggccagtaggctggaagtggggaagggacagtggatatggagagtctattgttcatccagtcaactaaatatgttttaattgtagcaacaatgccataagtaggcctgacacagtctattagtttgcctcacttcattcttgtttcagtcactccacttcaaccatcgatgagtctgagatttttattccattcattgacaggagagacttcccttcactcatctgcacttttggaagataaattctcttgaataactcaatggaagttgagtttggagggaaaatactatttttattgcaattaatatcttgtttttaacttcttagtccaagacatctaatctccagtggcttttgttaaactaaacacctctgctgatttctgctttttcgtaggtgattcgcaaggggtggctcaccatcagcaacattggcatcatgaaaggcggctcgaagggatactggttcgtccttactgcggaaagcttgtcctggtataaagatgatgaggtaagtcacagagagtgataaagttttcttgttaaagtatttctcattttaaattaactgatattattatactatgcaattttgagacaccagtggttctctttcagtgagattaagcttggaatgtttgtttaaaaaggcactattattttcttatagattttaaagtttacaatattcgcccaaatttctttttctttttgtttatttctttgctgtaaccatatgtttgcttacctgaagaaatggaggtaggcatcaaagttgaaaacctccttctttataatcatgtcaatgtactggtaaagtgaaaacaattttcgttaaagaaagtgttgaaggacccaaggtaatagaacattttaagagtgaaattaataatattgatgcacagttaataaagcatgttggaattgttcctgtgacatctgtctcaaatgaaaggcttttaagaacgtccacatcgctagtcttcaagtgagtctcagatcattgtttatacaaattttgttctttgagaatttgatatctatgtaaaagcatgaattatggtaattatagtgttctggttcatgttagatgttaataattttggtcctgtgacttactactcatttaaatttgatagctataaaagtgcaaacaaaaaacttatattagtcttacagaaccatttaagtgctagaaatcgataccattaaaatgtgagggagcacagatagaaattaaactatgtcttgaaatttttaatagccctggtctgacctgataatcttttggtacttataatgcggcatgcaaacattagataaggatactctgtgatagcaaaactatgtacaggtgagattctcaatttcatgtggccacgaagggcatgtgttcaaagttaaaagtttttcctatcttggcctgacatcttttgaaagcattaccgggtgcctttgtcattccttggaggaaaagtttcatgtcttatatagcacttttcatttctcaggagatctgtgtgtaatagtgtgttgaaaaatattggataattggttgattgccactaaactttctgcaataagggaaatgaaatcctatagaaatgtatttaaatttttatgtcattgaccatagtcaaaagtagatttggtcactgtgatagtatgagggttagcagtggtttctttcctgtgctggctgcttagctatctctgtcattctgtgggaagctctagttttaacatagtttgaggagctcagagacacttccctagatgtaaaaatcactaaatagatgatcttctttgctgttcagttgtaataaggtatttctattagatatattttccctccaaggatttagatgataatttatgtgcatttaaatacgtgtaaaccttgggacctttctcagttatacaaggccgcagaaaatattttactaaggaatcataacagtgatggctagtgttttatatgtattaattaactcatttaaccatattcagccttaactactactatccctattgttgatgagaaaactaaaaataaaacaaaacctttttttaaaaaagtcttttctacaggactattttccttattgcagaacatttagtcttggcgaggataaccaacttaccaaagtcacacagctagttggtggcaaagcagaaatttgaacccaggctgttgagctccagagcctatgctttcaaccacaaataaaggcaagaatcccagagatgcctggagttgtccaagccaacctcatcccacagaggacttatgaagatgaattccaggcatctcagcattgacatgttcctgggtgttagcagcagagacactgaagactctggagtagctactgctgttggagtgtggcattagtctggctctgtgagtcctgaaaataagcccattggaaggtataggatgctctctgtagggaaggaagaagctttgaaggcttggtgagctcttggttattggctcatctcctctcctccagactcaggataattctttacaaaatcactgcccttgtagcttccttatgagtacttgattacaacaaatggaaaataaatatgcacagttataatattaaccaagtgccatgaatactcccgctctgtgtgctgtgtataaccaaggtatggtatggagggtagttgggggcaggtgagagtggaaatgacccttgaaataaatggaattatttagatgaagaaattctaggaaagggtagtttcatccatttagatcattttaaaaaagaggaaatgacaaagttactgttctatggagctaacaagcaaatagactagtaataaatgtcagatagtaaatgctctgaagaaaataaaatggggcattgagttagaaagtgataggggaggggtctttagatttgggtgattggaaggaagtaccacttgagcagagactgagatgatgagctgtgcagaagattttgctgaagaatattccaggtagagggaacagtaagtataaaaaccctggagatgggatccaacaggaagtctgtggctgtaacataggaacagtgggggagaaaggagataaaatcagaggtaccagtagatgggggccttatcagtccctacccaatggtttggattttattacaaggataactgaaaatgattggagtgttccaacaggttgtgacatgattggattgatggtttagaaagattgccctggctgctggattgtgcataataagtggtatggggtggatgcgtgaagggagcggggatggctagcatggaagaagggagaccagattggaaactctgaccatggtccaggcaagagaggatggtggctgggtagtagctggtggtgagggtgcggagcacttaagttcaaggtagcaaaattatgggctacacacagctatgattgagtcactagcttctgttactcattcagaactctcaagaaacaagacaggaagttctcatcattaagatcatcattgagactgaaagctggccttcgtgaatttaagcaggtataatgactagggggaatgctacttgcaaccacaactcaaactcaatgatgatcttaatgaggaggatcatcaccataatggctaatagttattgagtatttatagttcactgagcacattatttacattctccattttagagataaagaattgaggctcaaaagagagtgagtaacttagccaggtgctaagtgtcagtgctgtgctcttaatcatctgaacatttcccaacaattactttctgaacacttgttatgtaccaggcactgtcctaatcactaaggataaaatgattagcaaggaattcatggtacctattcttatgaaggctctttcccaataaagcaaacatacaaataaataggaaaacctagcagatgctgattacaggctaggaagaaaataaagccagtgatgagttgacatagagtgtctgggatagaggacacaggtagggggtactttacattggatggtcagagaaggtttgtgttaatgttctgaggcaggattgagcctgatgaatttaaggagggtaattaagtccagtgtgactggagcaaaaagagaaaggcactctaaagatgaggattttgatattaagaatgatgagaagttttttaagctggagagtcacatgataagatttgaattctttactgattcctttggttgccttgtggagaatggattggaagagggcgaaactggactggggagttactagaaagctattgctttctacatctattgtggtctgcatagataatggtagcttgggctgggatgagttgttggaatttgataaaaatgaacggatttaagagatgtttttggaaggtgaaaattgacatgaacaactcatcacacatgctaagagttgcagcaaactgtaagcctcttgagaccaggagacattgtttgttccctgtcctaccaccaggggacatagcactgataggagacactaactaaatattgattgaatgaaggtgtcattgagcaaatgaatgaataaatgcagcataataattaatcacgtcctggcatatcaagtgtcaaaattaaattattgaattacagaataaaattaccactaaaggtagattgtcttaaattgtcttaaattttgttaattttcatcattgaaggttagtgtttttttgtttttgtttttgttttttgtttgtttgtttgttttttatcctctgactatatatatgtgacttcctggattgaaaatcatttaaacagaaaattaatttcccaatgttgttttcatacattgcccatatatgttgtacatttttggaaagggatttagtaaaaagcaagatgtgagaataaaacagaaactgtcatttcaaaagttttttgaaatggatttttgatctagataattttacattaatactttaaaatcagacttgaaaaaaatgatggcttttctttaacttatgtctaaaatgtgaattttaggagaatgggagaccctgattcaaggagaaaagagccttatttttcttaaaaccaatgagaaatttgttttaaaaatacataaatatgtaaattttaagagataattcaaatctctgaagaaagaggactgttaatttatgtataataaaagcacttagtcaatatttattctatttctatagcccagtgtgtaaagatttaaatcataatgagctactcctaggcaagcagaataatgcaacataggcgtttccagtggaaatctgctaaccttatactattgaggaaaacccaacatctgcattgaaataaggacattctttggactcttaagaaattacaggcctcatttttgtgggttgaagtgtttggataacttgataaggagattatataattcccttatagggatatttacttagcattgttttcattttgtaacaataacaaatgacaaatgtaacttcagaaataggaaacaaaatgacagttatatccctggatgatcaaagttgtgagatcaagaagttatagaaatattcagctctctttctagtttcacttatacttttaagattgtgcatatttcctaccagatctgcacactccctgtggtggaaaaggtcagcgtcgaccctgtgaacactgttcacactccttcgttaagttatttagttagccaaaacttagatattttcacaaaagtcccagtaaatattgaactctaatccacttatattacttaaaattctgcatgatcacagttgtatatttttttacatacataaactatctgatgttattcttttttaatataggattattcatacaaatatttccatgttctggtattatctaaagatttataattttgaaaaaaagagtattattcaataaaccataatggccaatcctattccaaatttattaaaaatgagtttagattcaaacccactcccctatatgcattatttgtcccactcaaaagtttatcctggaagagcaatattatcctttatattaccctttcccagaagagaaaaatttttaaatgtgcctcatttaatgactttaaaatacatacaaaacattctttcaagcattttttttgaaaattgagtaaaaaatgtttaacaaaaaaggtgttaactttatgttttaaggaaaaatattgaaaatgttatcctggagtgcctcaccttaggatgactctgctgccgtcctagctttccctttggagtctgaaggacgggtgtagtctccttaatgttctggctaggtcattgtctcattctgggagctgtcaagcactctcctgagccttgcagggtccagtagaataattccatacgtgaactctcataggcagcatttgcaacaggtggtacaaggcatttaagattgggtagaacgatgtcgatattctgtgagtaatttttatattgtcttcctgtttatattctacattttgtaagtattgtttaggactttatttgctagtaatgggacttttatttaaggcaaaaatctgcatcgtgcaatgtatcttgcagaagcagagatgaattttagcagatgacatattgccataagacaagattgtttaaatgagagaaatttaactttaatcatatttgtgctttgtagttttgccccatcattcagttttttaattaaagaaactataatgtcaggtttggttaaaatatcattgtcagaaaatttgaaactcactgggatcttagctttaagactgagactttcattttaaaaataaaatagctgaatgaaaaatagtttgctttagttaagaatacatacataaagtgtttaattgttaaatgtgaaaaaagttttgagtagccttgtgttacattttttaagcttgaccagaatctaagaaagatgaaaattaatttcaaatactgaagctaaaacatgttaatgaactaaataaaagttgacacatttctaattttatccatcttcccaccttttacccttaagtatttaaagtattcatagacaaaagccatcccttatcatttcactccagttaacagtgcataaactgaagtttggatattttctcaaaagatgtgtcaaaatatacatttcaagtgcattaaccactttccttatgcttctgaagataaatgaattgcctgaacatctcaagatcttgaaagtttatagtgatggaagcataggttgcaagtgaatgtgttggccttgtaaattctactcctagaactgtagcataagcaccttcttaattaaagaatgacgcagtcataaatttatgtataccatgacgcgtggaagtatcaaaaatttcaactttccatatgtcaaaagaggagaaactattattttaatatagttgaacactagttggaaatagtagtcttttcactgtgttttgcccagacccagactggcagagttaacccagactggcagagttaactcaaagcacttgatcctttggaatactctttttctcccttttcttttctctgtctttccaccctatccccttccaaaaaaaaaaaaaaaaaaaaaaaatcatgacatagaaaaccatacttagtttatggacaagaattcttagaataatttattctttgttaagcatcagactgaagttatattgttttgttatattgagtttttatatcaatatagggtgctgcaaagctgtgtacaataaaggtcaagggtagtgatttgctgacaacaattaggaaaagagaactatagaatgcacaggaacattttcagaaatgggttttattatatttcataggcaccactcactttacttttggtgggttttaatacttgaatcaaaataaaataatacatgagttaagtattaaaccaacagattaaaaccccaggcccccgagcccctcattttggttgtagctcttggtgtagatgctatggtgtgagggctgctttctttcaatggctggttgtcattcaggctgggttgtcatgtgactgcctgtctgtgcctgctgtacaggtgagcggatgttctgcacagcaagtgtagacaggcagacacatgacaactctgtccagccaggcccttggttccttcaggtttcctttgctcatagacagatacaatcagcctgttttccagatttggtgattttggagagtaaggggaaagggagaaaaatacacaatataattaaacattaaaacattatggaactaaaaacaagttagacttttgactttattcagaaagtacatttatacatttgttccaaatgtgctaacatggataatttgcgtaacagaaaactcacattaaaattttaaggaaaaaaagagattaaacacaaggtttattcttaagtccaattcatattattactggcccacatgtagtcagagttcagcgtaattgaaccagatgtttttcctctttgcaaaaaactgcatattttaatactgaagttaaagataaaaactatgtttatgcatgtttcttttagtagataagtaccataaccttgtccatgaaaaagaaaattatcatttacatggaaacagcagcccttttcaaaataattaatgagcctaatttatttggcaacccaagttgctgactttggtatttgatgctctgataataggatcctacaagggaatatgtttttaccaattatatgtgaaacaacaggaacctatttaaatgtctcattttccttttaaatgcaaagtttataactgtggatgtgaaatcaaattaaaggcagttgtgagcttaagttatccacctcttaattaactatagggccatgctgtgaatcaaaagggtacaaactggaaggctgttactcacagtgatgctcagaatgtgttttggatatagttagtgcaatatagttacaaaatagtacttaagaaaaggcagaaaaggcaaattcatttcatatccaaaaaattaaaaccagatcctttgaaaatttttcttataatttatatgagctaatagtgttaaatatgcagatataaaatttaattctggtgagttgagagtaattctattttaatatcaattatcaattcacatctttagaagtattaagcaaattcccctccccttttaaaaacaaaaatatccaaatagtcaaaattccagtaagtaggacttcttaaaaaacacagcaccaaaaaaacacagtattgtccaaggattgtataattagacattttctcaaagaactttaagaaaaacaaacagtttgtgatttatctttaattgtaaaattctgagaaaatagcaaatagaaacttaatggaaagcaaaatagttttagatactgagaaaattacaattttctacaaatctggacttttatgcagtgattaggtaaggtaatgttttaacaaaagctaataagtgccattttctgtgtatttatgtaatttcaagaaaacaaatttccgattctgtttcggccatcactttcgagtaaaggaactttttttttttcttgacagaatcaaaaacatgagtaaacttggctgttatttaaataattacaaggttagagtatgccaaaaaccagtgccttaaaatactattgtgttattgttgctgcattcagtgcaacagaaagtaattatagagtgattcacttacaaagagtatattggtggaaattaaaaattactataattctttataacttttcctctctctcccataaataatttgatccagttaactctgctcaattaaaggaatgatgcatgcaacctgaaaaaataaaaagaaatatttgtgagtttgtatgttatgctttaatataaaacagttttattaaggcaagatataaaaattttttgagccagaaaaaccacaacagtttttcaggggaaaaaaaaaatcttgctgaaaacaattgttctattcataaggcttttggacaatttatgtttctgatagatttttaaaacacacttacagtaactatgtgacatatgcacacttcattgttatgttgaacctgcccctaaacttgttaaaaagatgaaagactgaaaaccatattgacctttttttaatctcccaaattataggttgaatattagtttattattacttaaaatactagctaaaacataaaagagctatttgtattattatcataccatgtaatttttagtgtggttattacaccttgttttctttttgtcttttatttcttaaggaaaaaaatgtaagaaaagaattgtcttctaagtcttctgtagtgaaattaaaccaaagcaactccaggaaactggctgtcacgctaagtcaaaaaattcaaaatgaagatttaattatttttcctaatttacttcgttatctctaactattaaaactgataaaaattatttgtaagagacctttgaaaatgagtaaatatttatttctacttaatttacagaacatgaaagtaagaagggatttgaagtaagaaagtttctatcttaactcaggaatttcctgtctcaggttaaagcctgaccttctagttattttaagccaggatttctgagtgatggtctcttagttattattttgacgttattgtgatgggtgggctattctccttagagcagagtaaagtgcattgtttataaagagcagatcccttacagagtaagtgaaagctttggcgtctctttaccgagcatggatgcttgtggatgagtgaattttttcacattaccaagttgtactttttatatcttataacagcttaagacttcaaccaaaaaagtggggagaattctttcgttaggatttttatgcctaaactgtttcccacagagtgaaatacatgggtggtctgtaggcgagaggtgggggtagatagtatattttggtcttttacaaacataaacatattatctgggccgaaagcccgaatgccaagcaggaaggatattaagcctattgactaactacaggaaagtgatcagtgtgaaactttgtcctatagtaaacagtctttctttgattttgagatctgtggcctaaaagaaaaatgagtttgaaaatttaagtccaccgttttagattgatccttttccagttaagaaattgtggtgttgaagctaaggctctgaacttcctttctcttagatggtggaaaagtccttttaacccagtacctagtccaatttatcaatcattcacatgctaaaatgaaaaataattatgaaatttctatgaagtgtagtttggacagaccctgaaacaattttctcttcatgaccacatataatgtttaattttaatacttacacttattacatccaggggtagttttagttgaagatgctcactgttggttagtttcctctggaatagattccatgatccctaaaatatttgtatatctccttataaagtaatatgaaaataaaattaaacatttttctaatttacctggatatagatatggctataatgtatataaatgtgggcgtgtgtaccagcgcataaactacaatcctgccttcattcagcagagctttataaaatgagcttttacctttgatctttaatttagcccatataattgaaaaataagtactattcgttttcatttgttaaaactttgcctcgaaaataagtcgctagagccacatcaagcatgtgcaggaactccttggttatccttttacaaagtaattcttatatttctactcctgtacttatgccagaggcacccttatgtcccttctatctccagactaaaagtcatcctgagggagaaaataggtgagggacccatagggattcatttctttgaaacaaaaagaccgtttaacatgaagaaagaaattgaaattaaatatacattaaatgaaagcaaattttgaaatgtaatcatttctagagtaaaaaaaaaaaaaaaacccagaaaatttgagaaaaacattaccaaagtaccttgttagctatttttcctcttcagtaattgtatcaattagaaaaaatatatttcttgaaaaaatgagctcctctaagttactttttttagttttcttatgtaaaagaaactatatagatttttaacatctcatttgttctactaaaaataattaatatggaactctccaagtcacaatagaaaatgaaaggataactttactatatcatctaagtgaaagtagctaaatttctccttgctgtttatattttaactaataatcatgaatatatgagaatacttaatgttttctttatacacattttggggtgatcagaagggtaatttttaaagtaagttgttttgacaaaagaaaacttagggaatcttttataataaaatattttgctaaagagaacttgagtcaatttttgaattgttgcaaaatgtataacttagaaaagaatttgttcaggaaccactgtaactttaaaggaggacaaaagagattatgtttatttttcacaaaccctgtagaagagatgttttcattatatagaattgtttcggaatagaaattaatgggggttaagaaaattagggatgaggcaataacatttttccagaactttctttaaggggccgacctctaaagttcagcacagatcacattgcaatccagacttgctctattattttctctattaggatttcattcagcttgagggttttcttccctcccaccttcctccccctctcccaccctctttcacctccaggacagctggaaactgaccaaagaaaacttctgccttcgtttacaaattccttttttatcagtgggtttctagacaaagtgccttattttaaatgctcagagaagtggaagcattgtaagctataggcaagagggctcagctgagcagcaattattaaccactctttgatttaaaaaaaatgtaaaacagatatttacaggggtatctaaagatagaggtttttattccctgatttactcagttgctgactcaataagttgtgggtcggtgctcttctctgggcaaatcccatctgcattgtctggtaggcaagacttggcaggttcttcttttattgttaggtactattattcctgttgtttatattacagaaggaaatcttcagaaaagcactatccatatagcatttaaaaaccagcaagtattctttactttggggaaaaatgacttcagtcctgggatgttaaaagttatacatacagccttcatccatataagtttttaaatctttgaattattattaaacaattcaaaagtagcctcattaaactattcttaagtgtctggaatgagttttttcatatttcattttgaagtgggaaaacctttaagaaaacacttgaattatcaatcttcagaaataaaaaaaaaaaaaacagtaaatcgctatataccacacacttttgctcttttaaaattaaatacatctctacccatcacacatgtacctctgtttcccttgcatgttaacacaaatcatgggctccccacctaggttcccttggtcacagaccaggtgagcagtcaagaaggccttacccgctggtcttcccttcggcagtcttttctcagcagtgtccccgagggcttcttggtccctagtgtgcaaaacctgtgaagaaaaacactggatatgagattcaaaaaaggagcaaacaaatgtcttctccttggaaacagcccattttgtccccagcggtccatggcgttgctctcccttgcccagtctaaccaatgtgcagactactgtacaacggcattgtcctgaacaggtagtctgaacactggggcgacggagcaggatctccagaagcttccttctatgtacttaaaatcctctcccggtcctcaggaaaagcctcccttcctgcaccaggggttgcattcagctttcccccctgaattctgctgcgctgactgagacacactcaagggctgtgatttccagtcttgacgtggcacatttgctgcagactggggaactggcaatgaatttaggaccaggaaaagggggagggctgggctggagagtccatatatgggatgatgtcaccctggggaggtttgggtatgcgctgtgccgctggagagaccgctagaatcgcctgctctcagacatgggtctgtgcataaaatggtaccagatgttttagtgtaacgttaagcagtcatttcatcttcaggccagatttttttcctcaactgggcaggaagtgggccccagtatggaaaagctgtaaaaaaaaaagagtcaagatgtacagttcggctgtggccaactgaaagtgagttagtgtagaagtacaaatttactgtctgacccaggctagagaagtaatttgaagatagagggtagatgaaatagtaaacagaaagttgaacactggaaggcagagctcatttggaaacctttttgagctttcctgtggcactttattttctggtatttcactcgtcaaaaagggcagataagtttctgtctgtctgtctgtctgtctgtctctctctctctctctctctccccctcttcccctctccctccctctctctccctccctccctccttccctcccgctctctctctctttctctccttctctctctccctccttctcctgtctgttgaatctgtcagcagcttgcaggctgctctagacttgaacagtaattatagcaacttcctgaaagtgaagcccccatgaaaagtctggagaaatgttctttgtcatggcctctacatgagtaattagttccacatgtggccttcctagtttccctcagctattttggctgggtctctgaatgctgtgctatagtttgacctaaagaaacgttacagtttttgtttgaagcatccactacgaaacaacgactcaggtcttctaacaaatcgcctctggtagatccatgctgttaggtatagcattgtttttcacttgtaattcctgattctgttttgatacttttgttttgttttcatggtattctgtggcttagttttatctctggttaactaaatctgttgaaatttgccaagtaccgcttgaccaaaggttataagatatcagcccactggcatctacttttctttccctgttgtggctgttttcaattatatatactcttgaatattctgaatatgtagttctctcactttccctccataggattctgatcaaagctagagtcgcctcaaacaagagcttgattaattgcccttctgaagatcaaaatgtgagaaaatttctaggtagcttccaaatttaatttgaccaaccagactaagaaacttagccttctttaaagaaagtacagccaaagcaattcatttccactggccttctgaaatactttttagaagtagaaaaatatatctcttttttatacgctgcattgtatatttcaaaaagcttcaagtgagtactgtcctaaagcatttgcttttcataaaatggcctcttttgaatcattaaatagcacactactgaagagttcaaaagttatgacaagcccttgttatcttgtgaggaagattaaataagataaacatgaattatctggcatcttaggatggaacagaggttagcactgggtacaccattcatagaaatatttatatcatcaataggagtcagaggaatgactttatatctctgtacttttgcttccatatttgtgtctttaggacctattcaatagtgcttgcacaagcccataagactcacctcccttttttccctgtcactgcttgcatattactggaaatgatctaagtgtgactaaatacaatctaatacttgtattatatgtggataccaactccattcttttcaaagtatctgtgtgtttactcacatgaagtcctcatagaggagccataaaccactgaaccagtagtcagccagtattccaggtgtagacctgcttctgccacagaaagtgaaagcctttttttctgcccactttcatttatgtccataagacatgccttggaaatttttgtcaaggcaaacaaaaggtggttttgatcagactgcaccatgatttcaccttagtctgtacatctatatgccctcaaatggttctactacctacaccaaatagaatcttacaatatttccatcaagtgacttaactttatactaatcattatgactcgtgaaacattttaaggaattttctccagagacagctatagaaattgagttccccttagaatatatgtccatctccttgagtttccagttaactgaagtgtttgtgggtgctcttgcctccaaatagttcaacgaatatttattcttgcctactcacctgctagtcacaataccagcaactgggcatacaaagattaagacctgactcctgccctcaaaaagctcacacttacataaaaagttaggaatacacatctgttaccaagtgcagtttaaaaagttggtcattctgctctgaaaagtccttggcattgatttggaaatgccttaataacttttcttacgtctgtaaagttatcacttgaatacccaaaatgtattgggccctagaaagcaaggttggacatgacaaatccttgactttgaggaactaaagttatttaatttgcttatttcaaaagttgttgaccaaagtgattattgaatcaatagatggttttgggtgactacaaaatttgctctattataaagggttattaaaaggaaacgctgtttcagttagttattgttcccaatcttggcacatttttatgactttggaaattctcaaattgaaaccaggactgaggcttctttctgtgtacctctaaaggggcagggttactagtgtttacaattattttgtgatatccagatatgcgtacttcagctaatattttatagccttaagttttttttgttacaagattagtgcacaagttcaaacaatagagaggtatgtcaagaaaaaaattaatcatcattatccattccaacttcttaatcatcattatcccttccaacttcttaaccctttctgtcttcccaaactaatggtaactgtttggcatgattcctttgactactttctcaatggtcattttacagcttctttacagattacaaaatccattcatgtacaacgtatttgtttcttataataatcctatagtgtagctattattatcatccccattttattgatgataaaattaaagctcagagagcttaaacattatttcatcagagtccacaaatggaaaaactcagtttttttctgtgctcagaaggatattgtcaacctacagaaacaacttgttcccctaccgaattcttatagtgcttatatttcctgttgttaaaatgccaattaattatctgctgcgctttcacagttttgtactaagacgttacctgtactgttattttatgtatttaaacttttttttcctagataaaatataagctaattgaaggcaggaacaatatatttgtattttttttttttttgactggctgatggtagtccatttagtaaactgttaaaagaatgagtaaagagctatatggtatgcatgtggtttctggtcaaatattcgtcatgataataacttaagaattacagctctcttaaaaaaatcataaataaaaaacatagtgtgcttttaatatttatatatgtgtctgcagctacgcaccagattgaactattctttttgaaataaatgtaaacattgaaccaaccatatttccttgcttatttttggccttctaatgttctggaagcatcctgtgcagctaccagtgatataatcttgtgtgaaaagcaggatctaaccaagttgtagtgtttcctttcttgttgttttctccttcccagtttgtatctaagataaaaatctagctgaccttagttcattgcaaattagagaagatagccccacttagtttggctttatgttgtgtagattagcacttttttttttaattggaggcaatgcagtcccctaatctcctgcatttcctattttgttagggctcaaaggaatagatatgttgtagcagagcattccacttttcttccctttcctgaatcacaaacaaatggcttccctcaaatcactgcagtgaagtgccttcttaggcagagatgcaacatcagcctgtaaaataaaggagaaatatttcagaggagtaagagattttccttcaacaactgaaaaagaagttaaatcagaaagctataaatcataaacttaatgcaactgattttacagtcttcagaaagtttgcaaaagacaaagattgtgagagaattgattttaaaacgtacatttacggacgcatgttttgtttttgcccgtctctaaaatttccattgctgagtctgtttatttagaaataagctcctaaccaaaagcagtatatattttatgaacattctttcctcaaatcaattgagaaagataatgttacgtctttgaattttactaaccactggcgtgcacagcagccatttttatatttcagtagcataatacatccagcagacaaaccttaaaaactctagctctattggataccagtcgcaagaaagtaaatatatgatttatgactccaataaaattggaagcactgtcttgaaatctttaggggaaggcaagttaaagggattagaaaattgttgctggccttttcaggcagattttaagtgagagcatactagcagtgtagtctgctgcctgcttacaccctcaaaagctgacaagcatcatctgaatgctatgtgctatgagctcccgttgaattccatgttacaatcagactttaaaatgagggctggttcccttggacaagagaatcatggtgtcctcaggtcactgacaattttagaatattgactcctgatgtcttttggcatcaccagtattttatttccttagtgtgactcaaaaatgaatatgcatgatatcctaaggaaaaaatacctgtatgtgcataatataaggacacagaaactacttttttttttgcaggggtggagaaagtaccctttctgtggatggggatacatgttaagcataatggctacaaggaagcatgtgtgtgaagggaagctttctgctttacccagaatacctgcaattatgcagtaggtcattttagaagctctaagtctttaagtaatgataggcatacttgcgtaatacatagcacattgcctttattttaggattttaatcttctagtatatacaaaaggggaaacccaaattacatgaatttctaaaagggtttgatccaacataagtctgtttagctgtgtccattatagatactttaactagccttctcaattctgttcagtttccagagaatttactctagtttctaaggacatatgagaccatattagaatacttctattcatgccatcatggaaattggctttacttttacataccaaaaaaagtacttggcatataaattggttcatgttgaaaggttatttacaggttgcaaatgagtattaatcacatatctttataaacacttattttagtattaatcaactaaaaatgatttccatttgccacacagaatcagattcagtgccatttcactgccactcaggaggagactacaaaagctatagagacaataacatatactgttttctgaatttagaggtttgttttgtttagttagttagtattttgttttgagcactgattttatgtcagggtccatgctagtgtctttcacatgtgatataatttaatccagcaatcctgaaaggtaggatctctccatggttacagatgaggaagcagaagctcaaggaggtagtgtcgtgtgggtattctggagccagctggcatgggtttgaatcctggcttcacagcttgttatgatgcttccttggcaaattatttaacttttctgacctctggttttctcatctctaaaacagggttttctgaaaagagcttagaacagggcctggcccagagctaagctttatgcaggtagggctgctgcgggacacaccagccacccaggattgttttaaaaacactgtaatggaagctgacttcttaagataaccatttggagaatctttttgaaaagccatcataacctttctcacccttgagtttatctggttttattacagatatatggataggtagactgataaatagatctagatatatatgcaattgtgtgtacaaatgtatgtgagcatatatatgtgtatatagtatatgtaaatatgtatataagtgtgtatgtatttgtatatatatttaaactagatcatctctatgtgagaattattaacaccaaaataaattcttttctctttttaaggtaatattattttaagcctagcgcatgtgcagtgtttttttgtaatcttaaacgttagttttagtgtatagacgtttcagtctttttaattgttttaacttttgcctgtcagagcttcatagcaatagttaaaggttaacatggaaatactgggtaagaaatacctttgtaattttgcaaatgcaacaagttattggtttctattcgagtggagctgtcactgaatgcattttaaaactacacacacattttgtgtactattggttcatttttgtttggggaacactcactttactcccaatcttctgtcttataacaaaatgttttcctctggtacaatttactttgtttccatctctcctcaggttcttcaagaaaaaactagcctttgttttcattggccagaatggattatgattgcttttgaaataatgtcttgttttgctgaaaagctagtagattattaaataatcattttttctttaaaggatttgtacttcattgagaatatgtggggtggtctcaggtgcttcctggccagtgtgtgtgtcaactactagggcaggtgcttggagttcaacttgcatccataggcattttcagggtctcatgaagttagtactgagaagtgcactaattgttgtttgtttgtttttaagttttctgaagagaggaaaacagtgaggataagtggtataaaaggagtctttgtttgtttgtttgtttgaaacactcttccactcaggctggagtgcagtggtgcagtaatggcgcactgcagcctcgacctcctgggctcaagtgatactcctacctctcagcctcccaagtagctgggaccacaggtgtgcaccaccatgcctggctaatcttaatttttttatttttttgtagagaagagactccctgtgttacccaggctggtctcaaactcctggactcatgggatcttcccaccttggcctcccaatgtgttgggattacaggcataagccaccgtgctggctaaaaggattcttttgaatttgccagaagtaattgccttctgctagtggtaaagccagtttgaagataatggacttcccttcctttttttttttttttcagtgatcccagacccagaagtttttagtactacaattcaattggttaatttttggaaagttgagtccctcattctttttaatctttaacaaagaacaagaaagctagtgggagttgattttccagtaaattttgccctatgtacttcgtaaatcaaccttaattttagttctatctttgtcttcagatcataaaataattagtattgctcaccctgtgattcttatacgggttaggttggatctgatttgaggtaatgtcaactgtaactattttattattatttaatttgattttgttttagattgcatgttgtagattcagacaaatttagatgaatgccacttctgttgcattcccatactatatcattttcagtgcatttgtcctgtgtatgtatatgggaggatttctgagtatatcaaattccccacttaaagctaccattcccacggtatgtgtctccttcacattcattatagaggaattttagtgagttttttgtgtatgtgcatgcggacagaaactgtttagaagggccatgttaaaaacggtttttaaccatgtaagataatttacataactgtgtaagataacttgcttaccaatgtacaatgtgattgtgaaataaaagctttgaattaacattcacagtgaaaacactaaagccaagtgtttcggcgcccagagcagaaactgtttggtgatttagtgtttgtacagatttaattagttatatttactttcaaaatttcatctttctttaacaaattctacttctttgaagttaaatgaaacctttgcttttttggattcaactgagatatcagagaaggagcattagaattgattggttcaagttcagctgtgccatttcctcatttgtcaaatggtgtaaagaaagatacctacctcagaggtggttgggaggcctaattcgatgatatggataaaataaattgggatgcttttgaaaacattctgcaacaagttcatacggcaacagtttggaggattgccatggcaatgccttagggaaagtggttatggtgttgtagcaaataccatttctacccttggtgacttttatgttgtccctgaacatttacagagaataggagcagagaatattaaactagttattttatcaaaaggcagtgatatgtgttaatttcccatacttcaatatatgcatcaatcacatgatcagaaagcattcagtaaaacaggcttattagtttttgcccttcttcctcctcctcttttccactatttcatcttttctttccatctttcctccattcagcacgaaactttctctgagtattcctcttctctccagcccctattcgtcctgtttcttttttagaacatgaagttggaattgaggttattggtaaaaaaatgtgttaggttatttaataagattttgtttcttctccttaaattttcagtcagatgaattaaaccctaggtgtgcattcttaaaaacaaatagctcccaaactaattgctttgatacttccatgtggcctttaaagtaatttttctatgagccagtagcttttgaattttttaaacattaagtgtcttcagaagggtggagaaagaaggatggagttacagattgatcatatttttatttaaaagcagttttctaaggttccaaagaatattgcataccaaatatttccaaataacatatatagaccttatcgtctgttccattcattcgttcattcattcgttgcttgtgacctgctgattcttcttaaactgtcgtttcacttattctgacatttatatcttatctttctaacttgattagaagcatcttgaggtccagggccatgcctgtagtttctaggtatgctctacaatggtttcccaaatggaatcaggtgaataaacacatattaattaatctgagattttcttgaatggaaggagtcaaagaaagaggattccttctgagtaagaatcaaggccactaaaaaatcaccttcctagtttacattatataatctttatttacctgtataaagattttaaaactgagttgaagaatgccacaatgtgtaggccatttttggagcatttgagagtgtgtttagaagtgccacaaaatgctacagatgccatctgacttaaaattcactcacggagtagtttatttagatgtgtgtttgctgggaatctactaccaggagaaatgtggaaaccacatgaaattcactacataaagaaatctggtttccatttctgtactgcattttgtgctagcaggaagaagataaacaagctgtttaaaactaaagtgaatggcaaaggaattccatttttagatcccaccccgtaaatgtattttggaatttgcaaaacctaatcctatcacataggtcctttaagaagggagaaaatgtgttgagtcttctagtattagctatctcagtggaatggatgagtaattttgtttcctgttgatgtagtgtagtaatacaactatgacatgtgcttcagttaaaattaaaacgaaagtctcattctagtctttggtaggcagacattattctgagaatgagaagagggaaggaagcaagaaaaggctcttttctgttagtttaagatcaccccttttaaggagaggagaattttatcctaagttttaatatagctatttaaaactctgtatatgaaaaggtatatgagtaaggcagatgagaggaaaaagattgaactgtttttattttgagaaaaatattctggaggttccttttaaattttctatttagtgatccttatacagtttaaatatgttatgagattgccatttaaagaggaacacactcagttaagataaaatgtattgtgattaataaaaatgttaatatttgaaacataaaggccaaccatacaattgtgattttcctttaataaacatgaccaaatcatacatacctatgtttaggagtaataaacatgcatttctcaacttggtaggccttgtgctttgcaaaaaaaaaaaaacctgtaatatttttataagatcaggaagatcataacattaaattgttcatttacttaagtaaattaaaactttcattccatggcttaatttctctcctgctttatggtggagaaaagaagctaattaaggtttattttatatactcttatttaatatggtgcttgtttgtatttttgttagttttactattgtaacttctgctctggtgattttttagctggctacacttaataattaatacataatttgtctaagcctacactcagagccaaggggctttatatctatggaaagtgccatttttcaggtgagatgtaaaagtaaacatccagttatgtcattcttttattttttcactcactccatgaacatttatcagacgcctgtgatgttagactctgtcctggagatactaaggtagaaaatacaaactttataccttcaaggagtttgcttgggatgactaaggggcaaaaacaattgttaagaagaaagatagtgattttagtatttcagataaatataaatctacacataagtttagatttatctaaaaatattatatggtctgtttagccaatgctaaaccattggttgttgttaggcagtagagtgcagtgactgagggagagactaaggagctagaaggccttggtgtgcgtccagcttgactgcttactttgctgtgtgacttggtgaatgttatttatcatttgtggcttttttcatccatagaacgaggataataagtgtttctacttcatagggatgttggaggactatatggattaatctgtggaagctttcagcatagtgtccagtgtatattaagcacttaaaaaaatgttagcttcagggatgatttccaaaatatttagcaacccagacagtaggggcatcaaccagtaagaactgctgttggctgtaaaaatctaatatgaccaccccagtgtttatggtatagataacagctcagttagccttcatcagttttattgtttctacttaaaactcatgctccatccccatcctatcctatggacaatggctcctggaccaggctctgtagtactaacagactgtggacttactaggtgcctgcaatttatatttttgtaatcttcttagttttgagtacctagacttagtatagatttatttcatgttccagacgattcaggatgtttttcttacctaataattcctagaaagacactagagccaagccttgggttccctactttttttcgcctaatgttggcaagtaattgttataatgtaggtgttcatttttttctcctcctttccctcctcctcctcctgtttttttctggaagagaaaaattatatctaaagctaattgccttaaattcttttttagaaagtgattgtatactataaataaactaactcttttcagtaatcgctcatttttttatttttgcagtaaggatagaatgtatgtaagagcatttaggacatataaagcattaaaggacatataaagtgcaaaagacattgtccttttaagttagaagacttgattcccaacactgccacttgctagttacttaactgtagttaattcactctgtgttacatttttccatctgcaaaattgggagtaatagaacctttctcatagagcaggagacccccaacctttttggcaccggggactggtttcatggaagacaatttttccacagatcaggatgaggtggatggttttgggatgattcaagtgcattaaatttattgtgcactttatttctattattattccattgtaatatataatgaaatatgtatacaacttatcataacgtagaatcagggggaaccctgagcttgttttccatcatctggggatgatgggagacagcgacagatcatcaggcattagattctcataaggaacacacaccctagatcccttgcatgtgcagttcacaattgggtttgcactcctgtgagaatctaatactgctgctgatctgacaggaggcagagctcaggtggtaattcaagtgatagagagcagctataaatatgtatggcctggttcttaacaggccaaggactggtactgcgttcgtggttcaggggttgggaacctctgccatagagtattgtgaggattaaacaagataatacttatcaagcatttaggacatacatttcagtaaattcatttaatttattgtatttatgaagcacttaggatatacagttgaccctctgaattccatgggtttcacatctgtggattcaaccaattgcagattgaaaatatttgaaaaaaattgggtctgtactgaacatgtacaggctttcttcttgtcattattccctaaacaatatgatataacaactatttacacagcatttacactgcattaggtattataagtgattacttacaatctttaaataagatgatttaaggtatacaggaggatgtacataggttgtatgcaaatatggtgccattttatataagggacttgagtatctttggattttgacatccatggtaggtcctggaaacaatccctcacagacaccaagagacaactgtagttaacattcagtaaattcacttaatgtattcagcaggtatttagagtacttactatgtgccatacagtattctaggcactggggatacagcagtaaatttaacagacaaaaatcctgcctgcatgataataaagtgcaaacaatatagtaaggaaagagaatagaaaatctgggaatggggttgcaatgttaagtagcatggttaagaaaggtggtatttgagattatattggcaagcagtgaggaagtaagcatgcggatgactgaggaaagagcctttcaaatggtgggaacagtatgtgcaaagaccctgaggcaagagtgtgcctggaggccagaggagctagaataaggtgaggggaagaataggagtagataaggttgataactgggacctgcttaagatctgagtggtacaatgatgggcatggagaggggatcaggaatgtaccagtgaaggtttcttggaggagaaggtagatctggaaaacagagagaccatgaagaagcatatgaaaaaaggagaacattcctgctagtgggaagaacatgagcaaaggcacaggcagtggaaaagacagacctagagaacatccaggatcgcctgtccagaacagacagtgtgcagtgagaagagagggaaacaaggttgaataaatgagtgagatggatgatggaggccttgaaacctaggcagaggacttttggtttctactgattagaaagatgtttctagtcaatagaagcaaaccaatgaaaaaatctaaagtccaaatttaaaatcaatatataaactaactctctcttgctaaaagatactgtttgggtttgttttcagagacaagtaaagaatttaaagttttattgataggtttgatgtaaaatagagaaaaagttttgatacttaaaaaaagtgtttactattaaataaaagattccctaatactctactatgtgagctacagttataagcattatggcttaataaattaggtgttactttattaaaataataatcctttatgaataatcttagtgttgataaaaacatgctggggatcttgttctcttctttctgcacatgatcaagctttaaacctaagcgttgttttgcttgctgctatgtatgtatgatcacatactcacaaataaggggcaaaatgagagaggcagtgagtcaagtcatctaaatggtcacattcgtcctttggaaaattatcttgcaacttgagacccattggcattatttattaattactgcctctttttacattctacttaatgccaagctatgcaaaaaagttatggttggagaaaaaagccgtctatggaaaagaacaagcattacctgtgtgtgagtcctactagattcatcagacttttgtcttctttgcctcacactttttaaatgtattatcttcagaaaaagcatttttacttgaaaataagtttgtgtttctgctacagcaagttcatctcacattgagttattgtccaagactgccgtggtaaatatagtctgctccacctagaactgaacttattttcatatggattggtcctcctcagaaatttagcatgtgtataaacatgtttctttagctttcaaatgtgaatgagatccagtgctaagttgattttcatgaaatctatcttaagaagtagatgatgtgactatcaattgtgtacaggatagaatgttaggaaacttttgattctattcctgccttttattttgcagcaggaatttggcaatgtgtgtgctccctctgttgttgagtttcttgagtgtcttcatgaaatagatgcaaaatatcagctaatggccacaatagattttcactaaaaggctacacgaaattattaattctgtttgtgctgtaaaatgtgaattacagtcatgcatcacttaacaatgggaatacatttagagaaatgcatccttaggtgatttcatccttgtagaaatatcagagtgtatttacacaaacctaggtggtagagcctgctatatacctaggctatatggtatatagcccattgcccctaggctataaacccatacagcatgttactctactgaatactgtaggcagttgtaacacaatggtatttgtgtatctaaacgtgcctaacaaagaaaaactacagtaaaaatacagcataaaagataaaaaaaaaaaaaaaggtacacctgtaaagggcgtttactatcaaccgagctttcaggactggaagttaccctgggtgagttagcgagtgagtggtgagtgaatgggaaggcctaggaaattactgtatgctactgcagactttagaaacactgtacacttgggctactctaaatttatgcaaatatttttttcttcaacaataaagtaaccttaccttactgtaacatttttactttataaactttcaaatttttaaaaacttcttgactattcgtaatacagcttgaaacacagacatttaacaactgtaaaaaaaatttcttttttaatatccttattctatattcttttttgatttttaaatgtttttattttttactttttaaattgttttgttaaaacatatagacacaaacacacacattagcccaggtccacacaggattggaatcctccatatcattgttttccaccttcacatcttgtcttactggaaggtcttcggtggcagtaacatgcatggaactgtcatctcctttgctaacaataccttcctctggaatgccttttccaggacctgcctatgactgttttacagttaactttaggacaaaaaacaggtagaaggagtacattctaaaataatgagagatgtatagtatagtaaatatacaattcaatagcatagttgcttattatcattattaagtactatatactgtatataattgtatgtgctagacttttataagactggcagcacagtaagtttgtttacaccagcatcagtataaacatgtgagtaatgtgttgcactacaatggctatgaacccataggaatttttcagctccattataattttatggtaccaccattgtatatgcagtctgtcattgactcaaatgttatgtgttgcatgatagtgacttaaaatcctaagaattaccttattaataggctgaaacacactgtgtaaatcaataccagtttattaactttggtccgatggctggattatttactcttttcttcagtgattttcatgacagacttcagaataagtttgctagtctttggatgaccctggattaggccgtggttttcacctcctatatattattattatatatatgtatatattttataataatatatatgatccagatacaaagtggtgcttgccattcagtgaaacagtggataaagaacagaaagcagttcaggaggaacaaacgaatggcactaggaaggaagacaacagagcactcgaatgttatcatgggccgtttctcagcctaacttcagcattatgagacacttattaagaattttttaaaagtttatcacagtattagagtgaaataatagggatatgagataaatcaacagagtgttgctggaatgggataaagagaagataaaaatcaatcaagaaaaatgcttcccctttgcttgacattggtaatgagacatgactccatttaatacctacattttaagagagatatgaaaaatttgagaggggtaccacaaatgagcaactaaatgattcaggactgcaatctggtaatgtaattggtgggggcctgaggaggactttatgggaaaaggtgttgttttgacttggacagaaggttaatatcgacttaactgcctcaaaataaattagatttcagggtaagaaggatgttcagccacagttcatcttctgaggtaaaataaacaaactagtataaactgctaccagagacatagattgagcaaaagaatgaactccatgaaattgactgctattgaacaaagagaggtaccatcatgataagttgtgggttttctttcagtgattgtctttttaaaatgagatttatccgttggggttgggtaatttggctgtctcgttttctaaaagtgtgattctctaaggcaatattttggataaagtgtatttgccaaggaattaaaagagctttgtctgacatttggttaaatttgttatttgcatactttaaagcattcattcaacaaatatatattagacatggacttatgttagtaaatatttttataatagtaggaaacataggaatatgtgctattattgtcattgagaaacaatgtgtaatttcttgcctaacctctgcttttgattatttatacagttttttctaatgagataatttaaacttagtataatatattgacgtatctgttgcttttgcttgattatcagctttgagattttccttagagaatgcatgatttataagttcaaaaaaacaacattttgggtcaaatcatacacataagggctgctttccaaacatttggcagtaaattctgacctcctgattaatgtcaagtagtttacttaatatatgatgttgtcatggtgacaattactcaaaaacacaaacatggaaagcagaaaaaaaatagaaagaaagagagatggctgacagctttcttatgtatttctcctgctttaaacgtattccactaaggggtaagaaagataatttttccttgcatgcctttttatactttttgaattttgagctatatgaatatattgctaattttaaagtgttacattataatattttaaaattttaaaacaaaactttggctttgttttataaataaaatctcttaaaaatttttcttttgaattaaaaaatatcagatttcccagaataatttacttcaatctattttaatctatactgagatcattatgtgagagtattactcttttctttgttttcagggctttgcataaggtgacttgaataatatatgcaaaagatattttgtgaatgaatacttgtgaaatcttttaaatattcctttaatacagaagcatatattcttttcaagacacttacataagccagtttttggtagaattctgcctattcatgaaagcaggcatccttgagacttatttttcttacagctttactgaagtatacttgacaaataaaaattatatctatttaaggtgtacaatgtgatgttttgatatatgttatgaaatgatgaccacagtcaagttaattaacatgtacatcacctcacatcattactatttttgtgtgtgtgtgcagtgggaacacttgagattgagatctagtctcttagcaaatttcaagtttacagtgcaatattctttttttgtttttttttttttttgagacggagtcactccgtcacccaggctggagtgcagtggtgtgatcttggctcactgcaacctccatctcctgggttcaagccatttttctgccttagcctcctgagtagctgggactacaggtgcatgccaccatgcccagttaattttttgtatttttggtagatacgaggtttcgccatgttagccaggatggtctcaatctcttgacctcgtgatctgccccccttggcctcccaaagtgctaggattacaggcgtgagccactgtgcctggccaatattcttaactatagtcaccatgctgtacagtaggtttccggaacttagtttgttgtattactgaaagtttgtaccctttgagcaacacttccccatttcctccaccacccccaggcctctggcaacaacattttctactctctttttctatgagttcaactattttagattccttgtaagtgagatcatgcactatttgtctttctgtgtctggtttatttcacttagcatgatgccctctaggttcatccgcatggtcacaaatggcaagatttctttcatttttaaagctgaatatttcattatttcatatgtatgtatttcatatgtgtatatgtatgtgtatatatgtatatatgcacatgtgtatatatgtatatatgcatgtgcatatatacacatgcatacatatatatacacacacacacacacacacacacacacacatctcacatttttttttatccattcatctgttaagttgtttccacatcttggctattgtggataatgctgcaatgaatgtggggttgagactttataatgaactaaccactaactgagctttttcaaataagaaagtacagttgaaaacaacagtagcttcctacttaaagtaataaaggaaaaggggagagaattcgtgttttatttgtctttttccttttctctctctattttcttttcttttctttttttttttttttgaggccttactatgaaccaaaataatatgacacaatctaaggtgacaggcagtgttaaggtctgtgttcaggttagggtgctattacttagtattacagccagaggatcagaaatacccaagtcctctgagactacagcaatcacttcccctatggttgctgaggatgcaataatggcaaagaaaagcaaaataacaccttgttattttctggggatttgtccccaaatcttagtgcaaaaaactctggccagccaggccagaccatgtatctggagcaaccacttctcctgaggtggtgaggcataggtagcttcaaatcaaaggaggcctttactatcccaatgttcatacccaagtttttgcgtcttatcatattctaaccacacataaaaggacatcagccttgaccctaaagatgccaagcacatgacggtgtaaaccagagggacagctatgcctgtgtgtgctgatcttttcctgttaatccctttagcaagggtggcccaatctaccaaaccatagccactcctgctcctggaggacagaggcagtgtatgaggaaggtagtgggagtggttttaaaggaccctttttcctaagggcatcagacatggtaaccctagggtggtcaaaagtggctgggctacactgcagttcttctagtcatttgtttcaaagcccaaagcaagcatgcctcctgtttatactaatggcacatgtaaccctttttgtcctgaggctgagtacttggcacaaacacaagctggtcattttaaccaagagtacaatgtagtctggagatccagtgttattaattgtccattttcagcctatctaaaggagcaatcttagtaaatccacttacatgtatgtgcatgttaaagacctaactggtctttaacctgattcctttttcaaaaatacagctttactgggtgaagtgtaaatggaaactctctactattcttccaatgctttggtaagtctaaaattatctcaaaaaagtttttttagaaagtggaaaataaaagatagaacaaaatgacaatctctttcaggggaaaaaaaggtgagagtaacagagtaaagatattttactttaaggaagtaaagatatttctgcatgtttaatatttatacgcatacacaaaatacagcttttatgataccacactgctcaaaaactcttagtgacttcttataatttataggttgcagttcaaatttgttagtcttggaatgtaaaggtctcttaaattgagccccagcctaccttcccagcattataggttactattatcctgctccagatccctagccaaactgggctcctccctgacctccagcagggatttccccttctacctcatgaaatctacagcaaccaacgctgcaaggaacatttaaattcttacttccttcaagaagtcttcccggatcacctccaactcaaggtaatactttattcctctgtgacaaatgttgcatagaaatctttaatgcttctttaaaatatattatttttaatattcatgttatgtgcttatgtctcatctctccactagaatttttaagctattcaaagtcaggaccttatatatttttttgaattcttcacattgcctaaaaccttaattaattaaggaatcccacaaacttttatcaattatcttttttgtgccaggcactgtgctgggtgcttggaatataaagcataataaaaagatttcttaaggaagcctttcttgtttccccctggccagcttagagggtctctcttccgagatcccattgcatcctgtcctaatcactatcttattaatactcaggggtattgcaccatatggtttgtggagtatgtgtctgtttcctccaggatgcaagcaccttaagaagagacacttggtcttttttcattatatcccctgaactcagaataaaaatgtagaaatgctcaatatatgtgtgctgaatgagaaactgcagctgaaagttgtggttggttagtggaataattatagctgataccctcaattaaataggtgattagctttcaaacaaaatacattcttgtgatttcttttctttctcctcttccaattaatgtatatttttaatcatcatcactaaagtacctcacgacataagttttatatatgctgtaatatgaatacatttgccatcatagtgatcacatcatatataggtactacagatatatacaagttttttgaattccaggaacaaatgtgcactgccaatttgattatctctagctataggtatcaagttaggattagacctggatcccctgaagacaagtaatccaacgtgggttttaatctgtttttgaattctaagtatctagcgcaagcaaggtgcctagaacatagtatacaataaaaagtgtttgcagaattaattatatgaataattacatttccccatcctacccaacatatttttttgctagtcattttaatctcatttttttatcaaagctgctaaaaaatagaacttactcattttaattttctactactcttcctgcctttttgctctaaaatcctaaaatgccaaaagtgggagcttgagactaaaaaggagcaacaaagatttatgtcatccagaagttcattctcagatctatataaatggcaaagcattgcattcttttttttttttaatactttaagttctaggatacatgtgcacaacatgcaggtttgttacatatgtatacatgtgccatgttggtgtgctgcacccattaactcgtcatttacattaggtatatctcctaatgctatccctcccccatctccccaccccatgtcaggccctggtgtgtgatgttcctcaccctgtgtccaagtgttctcattgttcagttcccacctgtgagtgagaacatgcagtgtttggttttctgtccttgcgatagtttgctgagaatgatggtttccaccttcatccatgtccctacaaaggacatgcactcatccttttttatggctgcatagtattccatggtgtatatgtgccacattttcttaatccagtctatcattgttggacatttgggttggttccaagtctttgctattgtgaatagtgccaccataaacatacgtgtgcatgtgtcttgatagcagcatgatttataatcctctgggtatatacccaggaatgggatggctgggtcaaatggtatttctagttctagatccttgaggagtcaccacactgtcttccaccatggttgaactagtttacagtcccaccaacagtgtaaaagtgttcctgtttctccacatgctctccagcacctgttgtttcctgactttttaatgatcaccattctaactggtatgagatggtatctcattgtggttttgattaaagcattgcattcttaactgaaaattgctgattcttactaacaaaggaaatctcattttttttccatataattgatgccctcacttatttacttgggacaaacaggtacataatttgccttcatagaattatcaaaatcagtgtactgaaaatttaaatgcagtcacaattatttagttcatgttgctccaaaatatcacattaggaacttgaagtagagagacttcgagttgttaaactgtgtcttgataactcatattaccacagtaagattttttttaagtgcaatttcctgcaaagtggagattaattcctgacgctttgaggttttgggttcttcagataaaagactacaaagggaaaacatgaacataccatctccgggagtaattatactctttagcattcatggatgttatgctattttcctcaacattagcacaactttgccctatttcagaataaaacaaacatttccttatggctttaactacctatatcataattcactgtgcaatagctttcagtgctaggatgttaggtaaatacttgattaatgagttactttagattactaatcattaaatatggtctcccttttttttttgtcttttcttaaaatattaactacactgggaaagcaagaaagcacacctgccatttcctcactatgggctatcatttctccttgtatgtgttaacacagagaataaaggagaatcctgtatattttaacaaaaggtttagtggtcatagcagggtgaatgctttaaatagggctgagtatgcaattgttctattatcgagacaattgcctgattgagaacagctctctggaaaagctccaagtatgtgtccagattaccacagggtgcttggagtgattagaattgctcatgagcaaccaaatgctctggcttgtctccactaagcaattgaagtatatgggatcctgagagacatgacttagttgaaagtattctcttcctgttctagctttctttgcctcactggaaatattaaatgcacagcagacctctatacaggaagcccaaatgcagacattaggtttgcaaggtgtccccagccaactccacatgagacaggcccctcacacggtcttattgcctatagagtcctgctctgatgagaactttcagacattttaaaattaggcatagattatcaagctgcaccaaattgccaagttgcaaaacccgaagattatcaaggggtttcttggtaaaagattatcaagaaggggtttctactatgttgtaagaggtgaaacttggcatacattttaagacgaacatggtccttttgcatttgaattttcaaaggtgcaaataattataagtcagggatggtgaaaatagtagtagtctttggatatatacattagcttttttcttttgagcgctcaccatagtatatcttgctcagttatcatcaccatgcaattttttttataagacagaatccttccctatttctgcaatttgtttggaatgaaattccatattgaggggatattcctccattgcagatacttttaagaagaagcctctctaccaattctccatcaacctgaatgagctgagtttgggtactctcagagcttgaatgggtcaaatactcctttatttgccacttgggctcctaattaccccaagtcctgtctttttagctacatctctgtgactgctgcttctcagaagaaaatgattcattctgttattttcatgaaatcatgaagaatcccataatcttttcatcctatcattgggcatttagtcttagggaaaacaacattttgcctaagggtgtttggttttcaaatggttgagcctgactttttggcttctaaggccatggccactaatgccactgagccttgatcaaattgcccttaaaaatattgtagttaatataagcctttgagtttggcttatattaactagaatatttaattctagaaattaatattactagaattaataataaccagaaagatctagggtgacttaaaagaaaacttcatgaacaagattgacttactagaaagcatgtttgtaggcatgaacataggttaatattattccatttactggctgagtgatgtcaggctaagctgttatttgatgtgaacatcagtttctaataactaaaaaatggtttgttgtgatatttaaatgaactatccataattttgtttcttttttcttcttttgaagaattttgattttcagttttaacatcaaggaaccaagggcaaaacttaacagcataatgttgggttttacagtgtgcaaagaaatcccttgaagctctgtttataaacttagttgcatttttttctaagtatgtttaggaagcagatttggaaggagctagagatctatgcactacaaagcactagcttctagatcaatgttttcagcagggaaggattaggcagtagaagaatatcacatgaagataagctagagagttttttgttttgttctatttatgttttaaattcatatacattgaactttaatatatgttaaatacttatttttaagtcctctcaatatcaagtggaggtgccattaatattcccatttagtagataaggaaacaggcttgggatgtcagatatcttgcctcatgtctcatggctaataaatggagaagctgctatgtgaacacagatgtgctagacttaagcatttaacaacaaagcaggagggtaaagatgcacggggcccactctggagtcaggtcaccacttactagctgtgaaacttgggttcttaatctctgggtctcttcagtttcatatctataaaatgtgaatgtgaatgaaaataggattaaatgagttaatgtgtgtaaggctcctagtatggggaaatgaaatatagtaagaacttcagtgttaattgctgttgtcagtattacaattgtttgttaatgacagtcattttagggtaatctgtttagaatttatgaatggcatatcacaatgctgtttttttgtttgctttgtttttctgactgaaggagccagggagcatttcagtaggcattctctacatctcaccttctctagtctgcccacaaatcccatcataaattcttgcacagtccatgtttgaagaagactgactggtgcattgcacctttttataactaaatcatggagaagaaaaattgcatttctgagtttctaggggtcatgccaactctgtcttcattttatactaaactaaaaaatagaggggaaaaaagatctggctgaggtgatatttctatactgttagaaatagtgacgttatttttcatgagcctggagtttttaacttctgcccattctttaattcatgatctcttctgtatgctggtcttgtttgtttgctccttttcaacataacttctgagaaatagagattgattagttttgtgcctcaaaggacatacctccaattgctctaataagtccaaaggaagatgtgaggaatagcacataattccaaacagaagagggtttgtagctggtatgaattaactactgatcttgattcttcctccctatacttactctatattaccttctttattcaagttcaactattttgacttttggggacatgtaacaataaaaatgctttctttctagttattatgatcatgttattgaataattcattatatatatttttaaatggaattgaatgctgtatgataaaagtatatgaatagtttttgcattagaaggcagaagaaagtatgtgagttgaatataagaatgagttcctctgagtaaaaagttacatttcggagaggtatgactgcacctacctatttactacagaaaataggttagctgtgcattttatccaaacttgttatttacttgtcattttccatttaaaacagttaggtagagtagctgtatactgtctacaactgctgtgcagaaagacctcagtgccagcttctccttggtgtagagtgaagagatacaatcatgctttggaaaatgtgttgatatcaaccttagacagaagggttaggctgaagacaatctctcacaatgattgtaaaattgacttaaccaatacttaccgtgtggttatcttcagtagtgctaatttctgtactcacaagatagatagaagtaaataggacagtgtcaaaaaaatttctgtaaatagtagttattgagtctttattctcttcattgcagagggaagctgagaaaaggggatgggggattatattccagacacaagaaatctccagtatggaggtttgggagcatcaaagaatgggactggagaacagcacctggtgcctgttgagtaagaggtgcttgctgcttattgaattgataaatatttattgatggagtaaacagggtgctgtgagaagaatgatgggaaacaaccctctgggatgtaacagggaaagggtagagagccccctaaagaactgaaactccatcttctcagtaagtagttaacaacttgggtgctgctgcctagtgaggaagcccaagttcttcataggtgtgtctccaggccttcacttattcatttttgttacatctgcaaatacagtagtcccccctaattcacagggactacattccaagactccgcatagatgcctaaaaccacagatagtactgaatcctatgcatactatgctttttttccatctgataaccgagacagctactaaataactaacaggtggttagcaaagacagcatggatacgtcggacagagggatgattcatatcccaggtgggatgatgggagatttcatcatgctactcagattggtgcacagtttataacttatgaattgtttatttttgaaatttttcatttaatatttttggaccacagctgaccacaaaagagtaaaacttggggaaagcaaaaccatgaataaggggactactatacttactactgtattgatatcagccttatgctgagttggtgggtcatgtgaccaatagagaagggtacagttctatgtaaatcagagataaagataagacacaagatgtgatgtaatgccaagccaaccaccaaagaaaaactgcggaatttagtgagttattgaagcacttcccatcccgagtaggcaggacagcatgtgtggttgggaaaacatttcttcttaaacaaacggtgatgcagtgctgaagagctactgaaggaagagtatacactcatttccagtttttccaaacttggcatttttaaccattgttggccttttaacctcttttagtaattctatctatcatttgtgctatgcacataaaaagatagtaagctaccattacaggtggtgaatagctctggaaggggtttgagcaaggaaacaattttatgaggcttgtattttagagagattattctggtagaggtgtgaaggatggattggaaggaggaaaacttggagaaagggaaaacatttcagaagtgactgcaatgtgtgaaagatgatggatgctagaactaaggcactgacggtgaagatggagagccagggatggaagagggatgttaaagtaatagaattgatgagcagttgctaagggagttgagagagagaagagtcagggatgacgccaaagtttttgttaaagcaagtgagcagagtggcagtgtcaataactacatagggaatctagaagaagatgcagggggtggggatgttaaatgtaataattatttcagttttggatatactgagatttacacacatataagtcattcaggtgaagacatccaattgaaaatacaaaacttagtctcaaaagagagctttttttttttttttaaacaaggtcttgctatgttgctgtgttgcctaagctggtctcaaactcctgacatcaagcaatcctcccactataacctcccaaagcactgggattataggctcaaaagagagcttgaagtccccaaatgaatcagggagaagtctaatttcaaggaatgatttcagggtaaatttaaaaaggaaagaaaattatggttagatttacttctcattaaaagtattgaagtttagggttaatagttgagataattcttagcattaatgtttgcctttcaaggatttaatattcattaattttgcttggcctataattttatattttgcggtgaacataaagcatattcatccctaactggagatctctgcagcttaagtcttctggatcatatatggccaggaccaagccaggacaatagtatttaaaagccaaatacctaagaggaataccaaactagaaatccataactctggaatgccaaacttgaaattatgatgagttactggtgataccatagtagtatgttaataagaaaatagtatgttaataatagtatgtcataatagtatgttaataagaaaaactagctctgttgatttcattgactagaaatataaattatgttattctttataaaatatacactctgcaaaatgaagactatgctttagaatattagaaaatatttcttaaaagtacagtagccgaacctgaaacaaatttgatggttgagtatagaatgatttttttttctcctttttttcctgggcttgagtccatcagcttaggaaggaaatataaattaatggaacctaagtttaaattttaaatccaaggttttgagacctgtcctgctgaactgtggatccatcgtgaatatgctctgttttgaaataaatttgtccataaatgatggaggaagatttcagaccaaaaaacacttttttccttggctacatctgagacttggatacccactcttgatttttgctgtttggtttagaagggactgacaagttacacgttgttgatttatcttccttggctgacattttttaacaaatgtctcagtgttagagttggtgttgtgcttgatgttttctcttcttactctttaatatcacttgttaatttaccttatatcagaaaaagcatgcaacatatgtgttagtaatgatgtctactgagggaagattggcagactatcctatgaatggtatgtagactgcaagtagatcattttgtgttttatattttcacaaatgggtgaaggatattgctgtttcaggtttactctctaacattgagggaaactacaataggaattcattatgaatattaacaaatattttctgaataagatatcacaaaatggttcagaaagtttccataatttatctaagtggctttatatctttcaagaacagaaagtcgaatagtgggatcagcatcaagttgtggatatactgatttttaaaaattattatcttatttcatatggagtaaatttagttcattgaagcatacagcattctaacaaaacaagtaccagggaattttatttctaacaacagtttaccaatctaatggccatataccctctcctgactttagccaggcaccttacaaaatactgctgttgttcacacgggagacaaggagatgagtatgactggatcagcagaaatgtattcctacttttggaaaaataatgaaaagcacacacactggctctgaatcagtaatatctttatttgcaaacaataatcttcttttactaattatgtataaacctttgttttcttctttaatttttacaagtgattacaagtaaactgatatagcagggaaatcatatatttcagtgcctcaaaacctgttaatattgatttatccattagttatcattgaatacttactatagttgtagattgtgccatgggaaaaatagagaaaatgtaaggtatgatcctaatttcttaaagacctgacagtaagaaatggaagtatccattcatatatttaatttcagtgatgttagaaatcccatattctttgaagctaagtaagtggtatagataataagtacaaataagaaactggaggaaggagattcctccaagaactaatagcaagaaataaaattttgtgaaggagatgggagctaaggtgcacttttggtaaacattttattataacaaatttcacacgatcaaatgttgaaagaattttacattgaatattagtatgctctctaccacactgttgacattttactatacttgctttatcacatatttgatatattttaatgataggtagaaattggacaggtccagctaaaaggatgaaagtttgctcaagagtgggaaaagttagaaggtagattttgtggtagacatgctccagtggtctctatacacattctttataatcccctctcatgttgtttcaggattggtctgtgtaactgtggtaggctaagtaatccctccaaccctcccaagggtgtccatatttgaatccgtagaacctgtaaatatgttatcttatatggcagaagtgactttgcacacgtgatttgtgaataagttaaggattttgagatggagagattattttggattatctaggtaaacccagtgtaatcatagggtctgtttaagggggaggcagtagattcagagttgaagagaagatatagggtggaagcagaagtcagagaggagagaagatacaatttttctggctttgaaagtaaagaagctatgaactaaggaatgtaggtagcttctagaagccagaaaaggaaggaaacattttcccctagagctggtcataggaatgcagctctgctgacccattttagacttatgatctccagaactgtaaggtgataaatttgcattgcattaagccaccaagtttgtgttaatttgttactgcagcaataggaaactagtgccgtgaccaacagaatatggcaggaattagggcctgtaaatagccaggttagtgagcttggatgtttccctggtcagatcttcagatgattacagttccagtcaggagcttgactgcaatctctgggagtccctgagctagaatcacctagctaagccagttacagattcctgacccacagaaatgtaagataatcaatgtttactgttttaaacatcttagtttgggggcaatttgttatgcagcaaaagataactaattagtacagagtgaaaaggtaggttgagagggattgtgtacagttttgaatgctagactcattgccttctcagtggggaaccccagaaagtttttaatctgtgaagtgaccaactcaaaataatagcaagattgatctatttggatatattatagaaaagaggttggagggaggaaaaatagatgtagtaaatttagataataatattagatattgtaacgaaagcctgctctagggctatgaatataggaagggaaaggaaagaacatagatcaaactacaaagaaactcagtaggacttggtgactgaaggtgcttaacgcaaagggaaactgaggaattggcgatggtgtgttttgagtttgagagaacaatgatataattctgaaaatgtatttttttccagtaagagccagtttttcaaagtttcttttgcagtagtcctctcttatccatggttttgcttttgcagtttcagttacctgtggtcaactgtggtccgaaaataggtgagtgttgtacaagaatagagagagagagagagagacaccacattcacgtaacttgtattatagtatattgttattattgttctattttattattaattattgttatcaatctcttacagtgcctaatttataaattcgactttatcatagctatgtatgtatgggaaaaaagacatggtatatttagggtttgttacaattcaaggttttggacatccactgtggatcttggaatgtatcccctacacataaggggaagtgggggcgctactgtactttctaaaaccaagttggataattgaaaatgttgagaaagaagtttaggataaaggacttcattacctgccttgtgggggcttagaaatgtaagataactaagagacaaaattacgggatgagagtaagagttagggatgagacaataggagtaagggaagtaatgttaaaagatacctaactgtgtgttataaagcactttggctctgagtggacttatagccaacccaggggaaatgctaacagtgatgtggttttggtatccataagacaaacacaatctgagagaaatgtctccattggatcttcctaaaggtcatgcacatcctcagtattatcctgtggtaaatactatattttatagggtttttttcccttaatgtgcccaatgaatatacagtcatacattgcttaacgatataattatattctaaaagttgtgttatcaggcgctttctttgttgtccaaacatcatagagtgttcttacacaaagctagatggtctagcccactacatgcctaggctgtttgttttgttcctagattacaaacctgtaaagcctgtttctgtactggatactgtaggcaattgtaacactgtgctaagtattagtgtatctaaacatatctaaacagaggaaaagctacagtaataatactgtcatataatcttatgagaccactgtcattgaaggtgtggtctcttctcaactaaaatgtggttatgtggcatatggctgtaataagaagaagaaaaaaatccaattccaatccatccaacacactggtgttaaaaaataaacttaaatcttaagaaagtgtccagagattgatttttccattgagagtaatttattcatttatttaaaaatatttattgagtatttattatgtacttgagtctgtataattctgagagtacagtagtaaattttttacatatatgaagtgaagatgactggagaggggagtaggaggttgatgtgtaagtcagagaatccacaagtaaggaagggataggaatgaacatagatgaagcagttaaaagaagcaaggtagtaagatagtgcatgccgtgatgatgaagagagggagagagacagagagaaagggtgtgcaagagatacagcaagagagcaaaacagagagagaaagagagacagagaatggaccctggtttacttcaacttcaagctgatgttacagagatatcaatgaaaggaagaaagagtaagtcactgggtttgattattagttgatcatcagtgatctttaggatttcattgtcaatacaatggtaaagacagaagctagattgcagggggttaaggggtcaccttatggagatgaaatagaataagtcttattccagctccatgggcatgtctctatcgctttatgtctcagtccataaaatagagcaaaaatggtgatcctcctctagtctaaaatataaggaatgctttgaactgctgggtgagctaatactctaaagccagggcggtgatagtagttatctgtgtgtactttgaatgaaactggacttagaatgctgagctagttgttttgtggagcctactttcagaatgtcacctctaattttgcattcatgaaaagcattctcctgcctggactagaatccaaaaattttttgtttattattagtggtgactgattgtcatttgtggactgtgatctacatgtaatgaagtggaatttggccactggttgtgttgcaaagcttttctgagtagtgttattgcatcttagttttgacaaagtttgttactcccactagtatttaactggtattaaattcaagattatattttcataatgttgtttggaaaccaaaagaaaataattggtatgaacgtgctttgaaaagttaaaggattatataagtattaattataattatcattaaagtgatttaatagaagtattattctactaaaataaaataagaactgctaaattcaagatgtcattgagaagaggggagaagttttttttgctatggtttatttcagcttctgtataacttacatggactttctaagaaaaatgtatacaggcaatatttataaatatgtgtgtatattttaatgatgctatgccggatcatttctgcttggattatttgtggccttatttaattctggacttattttccagcatagttttgggaatacagattcaataatttttagatataaccaataagtactgggtgactactctgtaaaagcacttcttcatatctcacattttaatcttcacaatagcttcatcagagcaggtgttattacttttttatgtattaaaaaactaaggctctgagaggttaattagattttcgcccatggcgtacatagcagggattagacgactagaaccctaccattagtagataataagctcaggtggtgaaaatcaattagcttcagtaaagcctaattgtatctgtaaatatgttacaaatatcataccgtgtctctgagttctgagtcaaatttgcagtgtttttgaagcagcattgccttctgttacctggctgctcttgtatagtttagcatgaatgcatggcagtttgccctgtaggaacaaatctagtctatgtggatatactatcatgattcagttaggtctcaagatcagtaaattaatttatgtaaagaataagatactatgtatttcggtttttcaatacagaaccatgagtaggagagtttgtatgtttactgcatgctaaccaacacttgtttgttctttatggtttaccaatttcactcgttagatcctgacttttaccctgtatcgtagatagggctgagattatgcacctcattttactcacaaggaaactaaagccaaagaacagtgtgtgattttctcagtagccttcaaatatattggcctagaaaatattctgatagataaatagtctaaggacaagtggattcattgtaatatctgcaatgcattttatttcttatataattaagagcttactgctagaatacagtgtgatttaggtaaaacttctcaacatatagcatacttgagggaaaacagaagatcataaaaagtttccttcttttattgcaggaatagcatatgatttatttgaagcctaattattttccagaggaatgctctacatgtttccaatagctgttttgtgtttctgtagagggttagaggagaagctgccagtttcctcccaatactgatgttgcaaatctcagaactttaatctggaacactctcctctgttatgtatatgtatgaaaatttgccctacctattaccttactttggcatgtggcatttacttgtgaaaaatgtcacaatatctaatagtttatttcctactcatggatataaggcaaaataacattaaacaagaataaatatctgtttaccaacatttaaatgatagttcttttgttgtcaactggcaagtacggagcacttaccaagtgccgccactccgctgggctctggggaacacagctcttccttagctgagctcataatctggactgtgaggcctacacatcagggcagaaagcttctagtttcacttttcatatagtaattttgaaagcataagaggctttgcaaaacatcttttaaaataaagatgcttctccaccatctctaagataagttggttctttttggcaaaggtgattttaattgttagtacatttccaagacaagaaatgcaatctgttgacacgcccttcaaaataatcagatgaaaacaaggaacacaaatatgtccagccctgaactcttcatttttcctcttgatgaatcctttcttatgctttaaaacacttgagtttacacacacacacacacacacacacacacacacacacacatatttctggtaggcgtggagatatatatctatatatatcttgctattagggcaattccctgaaagattacactaccttctttatgcataacgtcaatgcctgatattaaacagaaacgaactatgtgactatgctttcctttttaaatatgtgaacgtatttctctacagagttgttttgtagccgtattgctactaaactggtgcccagctccaggcctgcagactgctgacacacaattaatctcacaaatttatgaatgccaaagcatggagcaaaatgaaaacaactgggggaatgtttaagggaaataattggactgtatccagatgtgcatgtgtaaaacatcaccacttaactcctcccccatatcctgtctgaagacagggtttttttttttttttttgaaaataaactggggttatttgaaagaagttgtggtctctgactaaaactgaataagcaaggccaggctggccataattctgtgtgttcttgtatttttgtttcttaattaactcattaggtgctgatgaatcaatctgcctcatgtctgtttttggtgggtgttgccacaactttatgaactctatttaaagataatatgtaaggggtttcaagactgatagtcgatttctttgagtttttggttataacgaactggaactttttactattagaaataggcaacattattgtagtgtgaaggtcatcaagctgggacgtgaagtctggtcaagaggaaaaaaatgtgacaacattttatagtttttttttttttaacagtctgtccaagatcagttaggggaaacaaacaaacaaaaaaacgatttctctaagatgcttaactcactagataaagcataaaaatggagataataatgttgagtttgtgtgcatgaaattaatttaggatctggcatcactgggatatgagaagctagaggacagggtgctctgaagaaatattttgcaggttgatgtctaaccatcattacataccttaaatggtactagagatgaagtaataaaacacactttttccctcaaatgcaaatatttcctcaaaaacaagataaccaagtccagcaataaatccaactcatttcaataaaatgttctccacagacttgcttttctcctactctgtttaaggacaaaaataaagatgaaatgaattgcaatgaacctgctcagaggtactcactaaagtggagcatagagaggccttctgctctgcatgcccctccctctatctgcattgtcctcagagactgcctgaaaattcaaattctgggcctcattaggcacagagtcctaagattgtgtttctgtttttattcaaagagagaaaacaaaagtagaaaaagttgaatacccaatcttttataccattgcaggaaggcttaaggaccccaatcgtcagttttcctgcaattggtgacttcaatatgagaatagtatcagcactttattttgagagtaagtattgataatgtagtatcattccaattgtgcaggtaattatttaaagtccaattttaataatcatgacaactgagtatagtttctatcaaaaaaaatttcttagttcctttaccaagaactggtaaaaaggcaactttttaactaaagggagctaggtacagaaaggcactgtcctgtcccagacgccaaaagtttagtgggaagtgatggccatagagagggaaaggggatgagaagatcactggtttcagtattaatacagatatgcacatacagcaccatctctagatcatgcctgttattctccatatcgtctccacatactacccaatagagatatattttatttagccagttttggtttcaaacacaaataatttctgggaaagttcaatatattggtttcacacactttatggatataatatcatgatgttgaaaatattctatattatacaaagtttttttaacacaaattaaattttgatgtcataagtgaagacttggcaaataaatactaagaattatctgtgtaccagtataaggaaaatacagtgattctgggtttcaaaacccaaatacactgaaacattgtggagtttttaaagtaaggaatgtgcttggtctggcagatgataaaacatgttagttgcttaaaattattgccaattattttggtaaatacattcaaacttttttaaatttttttattttttgtgatagggtctcaccctgtcacccaggctggagtgcagtgatgcaatcatggcttactgcagcctccacctcctgggcccaagcaatgctcccacctcagcctcctgagtagctaggactacagggttgcaccaccatgcccagctaattttttttttttttttttttttttttttttgtagaaacagggtttcaccaggctgattttgaactcctgggctcaagtgttccttctgccttagcctcccaaagtgctgggattacaggcatgagccaatacacctggcttcaaagtttttttttttttctagagaatcagcagtgtaatagaaattaatattctagtactcaaaacaacagcaatcataacaataatagcaaaatctatgttcttggctcagttacactcaagtaatagcttgaccttggattagttgctttatctcaattttatttctgcaaagtagcgtgaggatccctatcctgctcacctcacaagttgtgaagttcattaggtttattgttgcaatgttttctaaatcttctcattaaatgatgttaaaacctactaagaactcaaacaatcccagacacactgatggagaatttagatatgtagtctgaatatagcatcagacaacctgaactgttaaacaagcaaagaaaattatcacaaaataaacatggaaaatatcattacattgaccaccatttaaattgcacagttcttgtaagacatacccactacataaaataaaacccatctgcagagacacagcagtttttctgcagttgggagttggtgattgaaaagtaggaatttgaaattaattttttttagaaattgagaaattttatcctcccttctaaacaatgaccctcaacacagtaatgagcagcacaatctggagggtatggtaatatcccagaatatgtccccaggctaggtgctcagggcctaacttgcctttttaagaaattcattgtttctgttgaatgttgctctcttcatattgtctactttaaaagacaaatacttctgggatgtgtaagcccaggaatgggaaaggaggaaaaatcatcttagagtttattaagtacggaatctgacccatggacttgatatgtgcattctcattgcagacttgggtttggggttttacaaatgtagaatccaaatattagagaagttcatcgctttcctgtcaccctcttaagggaatgaactgtgtagctgagatttgatcccctagttggtctgccagcaagcccatgttctttcttttgcacaccctataccatataataaattaattcatgagatgctgtctttgtaacagctgagaattggaacactaagagagcatcgaacatctggaatagaagtaaagtgatttggaaaaaaaaagggaggctggaaacttagtcaacacataggggcagctcctctcactcagtgttcatgctgggtcctgaagataagtaggttttgctctttgcctcagtggtctttgacggactctgggtactaaagctaagatggaattgagggaagctcctaatgcctcctttatttgcatcggcagtgagattgaaagaggccccttcagtgtgtgaatacctgaaattaaagactagaaatatgcatttagactgtttactttaggtttcctgtttacatttgttccaattttattctctcactggggagtagaattggaatgcagagaaaaaggggtgagcacaagacaaagggaagtgaaactcaattttgaaagcagaaccatttttacatttaagttgaactgtggttttaaaacatttagctctctattggaaaccattgtgggtggggtgcatttgtaacagagcttcacctaattcattctatatgcttggcagaggaaaggctgaaatcagagccaaattccaaagagcctctgagggaagcaaggtcacactctattcagaattatatagcaacctggcctaaacagaagatttttaatgtgtttgtgcacttaggaatcatttttctagactttggtaattgtttatccattttgtgaagttctattgtaaatgtattgcaaacactgcttcatagctagataagaacaactgctgaataatctaagtcaactaagtttatttcatagctggttttgaaactgggaataaaataatatagaagggtttattgattagttccactgtcataataagcctggagaaatgtcttaggagccacattttgacttttttgtctgacgaatttggcccatcctcaaataaaaattgttttttaattccaagcagtcatattatgaacagttgttatattttacattgttttataattggtctcctgcatgataaaactcatttgcaaggcagaaaggcaaaaatgtgagaagcaagaaaccaatttattgttaatcaataattacaataaaaatgggaataaggagaaatgtgattttaactcacttcctgggaagacattccagagtttgggggatgacagaacatcttttgggtgcttagggaccaaaagggagtgaggacttcagactttgaagttatttttgcttacgaccaaccaactttacctcaaagtgcagagtgcttaaaagttaatttaaacgtcggttacaaattccaagaaatgtggagatataacccagaaaggcaacatgacctagagagctgaacaagggtttgggaatgtggacttggttgttaaccctgtgtcagttgctgtttttttttttaactttgtaatgatgaaatgcagtttccattctcctgaccaccttaaggtagtaccaatcgtgggtaaaataatatagaagagatataatataaaaggggaaataatttagaaggacaatgctgtcccccccttttgaagatgacatggatttagagcaaagttttggttatttttgagaggtccagaatccaggcatctgcctcttttgatacaaaggctgctacttcttgcttcttcaagggacttctcaccctctattgatggtcagccccctctcactgaaggaatcagaatcaattggtgatagaaagttttgagagcatcatttgccagcctggaagtatttttcatctctaccagttgttctttaactttttgaagttctgtaaacatttaagaacatcgtaggagttatagatgttttccttaggctattgcacacattcacagattgatttctgaagactcccccatcttgaagattgttcatggatcatgggttgtgaaccctagctatggagggtttgtgtctctaagctctgaaaacctcaccatccaggttgtcctctctgagaagctactctccatggccgagtcaccttaatgttgaaaggaaatatctttgcacatgatttgttctcttcttattctgcctgcctcttaagtgtcagaagacctccctggagggaacctcacaactttatgtcattactttttccaaggctcacttgtaggtttgggaaggttttcttttctccctcttttctttgcatgagagtctgtcccatctgccttttcccaccagcagtccagagtgatcactctcagatttttcacaccacttacgctttgtatcagcaatatgatattcatttttctctcttttggtttatttgtaaattaatttttactataaaatattttaatacatatataaatggagaatagaaataacacccattttaatacaatcttagcattataatatacttgcatcagattctttagaatggtaattacagttacacagtgaagatcttcactgcctctgccctgagcccttcttttcttccctccctggtagtaagtgctgttctttccaaacgtggttcatcctttacttttaaaaattattcttctgggtatagacctgatctattcaatgagactatattttcttgagaatggatagtagccttatttttgtttttgtttgtcttcagtgctcaggggtccttaatatgtgacagcagatgcatggaggtggggttgcgtggcacttgtgcctcctcattttaaggttcttctccatcttgtccctcaaagatggtttgcattgttacaaatgttaagaaaatcactttttctcctttcctatttttcttctttctacagaagaaaattcagatcatatgagatttcatgtttctctgaatatcctgttgctcttcacttctcctgtttccttatatcaggaatgattctttgtcctggtttctcagttcctttatttgcagctttagagaaataatcttgctttaggtcacctttaactttattcaaatagtataaagtaagcaatgaaaaggtaaagacaattaatataaaccccaaacccactatatatgtctactaagaacaaaactcaataaaaaatatgccttgaattccaaaagtatgtgtgtgtatgtatgtaatatgtgattaaactgacaaatttatttgctttccagaaattttgtttctttattttgtgtatttatacactttgaaaatccatcaatttgtcttggcaattctgatattactcctatttcacaagtaatgaaactgaggccaggatggctaaatgacatctcaggtagcagaactattaggagttagactaacgtctccagatttcttttccttaggctcaggtggttttcctgcttcagcctcctgagtagctgggaatccaggtttgcaccaccttgcctggattttcaacaaatgggactggctctctaaccaggaattgaacctgggctgtcatgacgaaagcaccaactcctaaccactagaccacagggtggagatttcttcttttttaaaaatctgcccctcttgtcactgtttctttttattgctaaataatattccattgtctggttgtaccacagtttgtttacccattcacccatagagggacatcttggctgtttgcagttttttggcaattatgaaaaaagctactctaaacatttatatgcatgtgtttgtgtgaacatgttttaaattcatttgggtgaatacctaggattatatataattgctgcatcatatggtaagactacgtttagttttgtaagaaactaccaaattatctttacaggtggctgcatcattttgcattccttccagaaacgaatatgagttcctgttcctttgcatgtttatctctatttggcattgtcaagttttttaatttaaggaggcccaacttatttttttcttcatggattgtgattttgatgttataccttaaaactcttcaccaaacccaagttcccctagattttctcctatgttattttgtaagagtttcataattttgtgttttgtgtctaagtctgtgatgcattttgaattaatttttgtaaaaagtgtgaggtcactgtgtacatgcagttctttttcgagtagacttatagttctttcagcatcttttgttgaaaagactatcctttctctattgaattgcctttttccctttgtccaagatcagttaactagatttgtgtggtctgtttctgggctcttatgttgttccgttgatctgtttgcctagtttttcaccaataccatactctctttattactatagctttatggtaaatcttgaatttgagtagtgtcagtctctgattcttcttcttgagtattatgttggctattctgagtcttttatttttctatgtaagttttacaagcagtttgttaatatctacaagataacttgctattattttaattgggattgcatttaatctatagatcaagttgaggaaaatagacatgttaatgtaattgagtctccctattcatgaacatggaatttcccaccatttattgaggtcttctttgatttatttcactagagtttcattttcctcatatagatctttttcatatgttagtagaagcatatctaagtatttatgtatttatttttggggtgctaacgtagatgactatattagcccatttttgtgtcactataaagaaatacctgaggctgggtaacttactaagaaaagagatttaatcaattcacagttctgcaggctgtacaagtgtggctccagcatctgcttctggtgagggtctcaggaagcttaccaccatggcagaaggtgaaaggggagcaggtgctgtgacatgttgagagagggagcaagaaagagagaagggggaggtccaagactcctttaaacaaccagaactcacatggactaactgagcaagaacttatttatcaccaaaaggatagtgctaacccattcatgagggttccatcaccataatcaaatgacctcccattaggccccacctccaacattgggaatcacatttctttttttttttttttttcactttaagttctagggtacatgtgcacaacgtgcagtttgttacatatgtatacatgtcccatgttggtgtgctgtacccattgactcatcatttaaattaggtatatctcctaatgctatccctcccttttccctgcacccccaccggcaggccccagtgtgtgatgttccccaccctgtgtccatgtgttctcattgttcaattcccacctatgattgagaacatgcggtgtttggttttctgtccttgcgatagtttgctcagaatgatggtatccagctccatccatgtccctataaaggacatgaactcatccttttttatggctgcatagtattccatggtgtatatgtgacacattttcttaatccagtctatcattgatggacatttgggttggttccaagtctttgctattgtgaatagtgccacaataaacatacgtctgcatgtgtctttatagcagcatgatttataatcttttgggtatatgcccagtaataggatggctgggtcaaatggtggtatttctagttctagatccttgaggaattgccacactgccttccacaatggttaaactagtgtacagtcccaccaacagtataaaagtgttcctatttctccacatgctctccagcacctgttgtttcctgactttttaatgattgccattctaactggtgtgagatggtatctcattgtggttttgatttgcatttctctgatggccagtgatgatgagcattttttcatgtgtctgttggtggcacaaatgtcttcttttgagaagtgtctgttcatatcctttgcccactttttgatgggattgtttgattttttctcgtaaatttgtttaagttctttgtagattctggatattagccttttgtcagacaggtagattgtaaaaattttctcccattctgtaggttgcctgttcactctgatggtagtttcttttgctgtgcagaagctctttagtttaattagatcccatttgtcaattttggcttttgttgccattgcttttgttgttttagtcatgaagtccttgcccatgcctatgtcctgaatggtattgcctaggtttttttctggggtttttatggttttagttctaacatttaagtcttttaaccatcttgaattgatttttgtataaggtgtaaggaagtgatccagtttcagctttctacctatggctagccagttttcacagcaccatttattaaatagggaatctttccccatttcttgtttttgtgaggtttgtcaaagatcagatgattgtagatatgtggtattatttctgagggctctattctgttccattggtctatatctctgttttggtaccagtaccatcctgttttggttactgtagccttgtagtatagtttgaagtcaggtagcatgatgcctccagctttgttcttttggcttaggattgtcttggcaatgcgggcttttttttggttccatatgaacttgaaagtagttttttccaattctgtgaagaaagtcattggtagcttgatagggatggcattgaatctataaattaccttgggcagtatggccattttcacaatattggttcttgctatccatgagcatggagtgttcttccatttgtttgtgtcctcttttatttcgttgagcagtggtttgtagttctccttgaagaggtccttcacatcccttgtaagttggattcctaggtattttattctctttgaagcaattgtgaatgggagttcactcatgatttggctttctgtttgtctgttattggtgtataggaatgcttgtggtttttgcacgttgattttgtatcctgagactttgctgaagttgcttatcagcttaaggagatttggggctgagatgacgggtttttctaaatataccatcatgtcatctgcacttttcctaagtgaatactccttatttctttctcctgcctgattgctctggccagaacttccaacactatcttgaatacgagtggtgagagagggcatccctgtcttgtgccagttttcaaaaggaatgcttccagtttttgcccactcagtatgatattggctgtgggtttgtcataaatagctcttattattttgagatacactccatcaatacctagttaattgagagtttttagcgtgaagggctgttgaatttcgtcaaaggccttttctgcatctcttgagataatcatgtggtttttgtctttggttctgtttatatgatggattacatttattgatttgcatatgttgaaccagccttgcatcccagggatgaagccagcttgatcatggtggataagctttttttttttttcttttattattatactttaagttttagggtacatgtgcacattgtgcaggttagttacatatgtatacatgtgccatgctggtgcgctgcacccactaacttgtcatctagcattaggtatatctcccaatgctatccctcccccctccccccaccccacaacagtccccagagtgtgatgttccccttcctgtgtccatgtgttctcattgttcaattcccacctatgagtgagaatgtgcagtgtttggttttttgttctcgcgatagtttactgagaacaatgatttccaatttcatccatgttcctacaaaggacatgaactcatcattttttatggctgcatagtattccatggtgtgtatgtgccacattttcttaatccagtctatcattgttggacatttgggttggttccaagtctttgctattgtgaataatgtcgcaataaacatatgtgtgcatgtgtctttatagcagcatgatttatagtcctttgggtatatacccagtaatgggatggctgggtcaaatggtatttctagttctagatccctgaggaatcgccacactgacttccacaatggttgaactagtttacagtcccaccaacagtgtaaaagtgttccaatttctctacatcctctccagcacctgttgtttcctgactttttaatgattgccattctaactggtgtgagatggtatctcattgtggttttgatttgcatttctctgatggccagtgatgatgagcattttttcgtgtgttttttggctgcataaatgtcttcttttgagaactgtctgttcatgtccttggccccatcaaaaagtgggggtggataagctttttgatttgctgctggatttggtttgccagtatttcattgatgatttttgcatcgatgttcatcagggatattggtctaaaattatcttattttgttgtgtccctgccaggctttggtattaggatgatgttggcctcataaaatgcattagggaggattccctctttttctattgattggaatagtttcagaaggaatggaaccagctcctctttctacctctggtagaatttggctgtgaatccatctggtcctggactttttatggttggtaggctattaattattgcctcaatttcagaacttgttattggtctattcagggattcagcttcctcctggtttagtcttgggagggtgtatgtgtcgaggaatttatccatttcctctagattttctagtttatttgcgtagaggtgtttatggtattatctgatggtagtttgtatttctatgggattgctggtgatatcccctttatcattttttgttgcatctatttgattcttctctcttttcttctttattagtcttgctagcggtctatcaattttgttaatcttttcaaaaaaccagctcctggattcattgattttttgaagaattttttgtgtctctgtttccttcagttctgctctgatcttagttatttcttgccttttgctagcttttgaatgtgtttgctcttgcttctctagttcttttaattgtgatgttagggtgtcaattttggatctctcctgctttctcttgtgggcatttagtgctataaatttccctctacacactgctttaaatgtgtcccagagattctggtatgttgtgtctttgttctcattggtttcaaagaacatctttaattctgccttcatttcattatgtacctggtagtcattcaggagcaggttgttcagtttccatgtagttgagcggttttgagtgagtttcttaatcctgagttctagtttgactgcactgtggtctgagagacagtttgttataaagtctgttgttttacatttgctgaggagtgctttacttccaactatgtggtcaattttggaataagtgtgatgtggtgctgagaagaatgtatattctgttgatttggggtggagagtcctgtagatgtctattaggtctgcttggtgcagagcggagttcaattcctggatgtctttgttaactttttgtctcattgatctgtctaatgttgacagtggggtgttaaagtctcccattattatatgtgggagtctaagtctctttttaggtctctaaggacttgctttatgaatctgggtgctcctgtattgggtgcatatatatttaggatagttagctcttcttgttgaattgatccctgtaccattaggtaatgaccttctttgtctctttcgatctttgttggtttaaagtctgctttatcagagactaggattgcaacccctactttttttttattttccatttgcttggtagatcttcctccatccctttattttgatcctacgtgtgtctctgcatgtaagatgagtctcctgaatacagcacactgatgggtcttgactctttatccaatttgccagtctttgtcttttaattggagtctttagcccatttacatttaaggttaatattgatatgtgtgaatttgatcctgtcattatgatgttatctggttattttgctcattagttgatgcagtttcttcctagtattgatggtctctaccatttggcatgtttttctagtggctggtaccagttgttcctttccatgtttagtgcttccttcaggaggtctggtaaggcaggcctgttggtgacaaaatctctgagcatttgtttgtctgtaaaggattttatttctccatcacttatgaagcttagtttggctggatagggaatcacatttcaaaatgagatttggagagaagaaacatccaaaccatatcaatgatgttgtatttttaatttcaaatcaaattattcattgctggtatataggaaggcgattgacttttgtatattaatcttgaatcttataaccttgctttaattacttgttagttctcaaagactttgggacaattgttcagaatttctacatacacaattatggcaccttcaaacaaagacagttttatttttcctttctgatctgtatttctcttatttccttttcttgacttatggcatcagctagaatttccaatatgatattgaatgggagttgtgagaggggacatccttgccctcttcctcatctcatggtacagcatctagtgtctcaccattaagtatgatgttagctctatagtttttttgtagatgttcattatcaagttgaagaagttcccttctattcttagtttgctgtgagtttttatcatgatggttgttgtcaaatgcttttcttctgcatctatcgatatgatagtatgttgttttattctttaatatgctgatgtgaaggattcaattaattgattttcaaatgttgaaccctcctagcatacctggaataaatctcacttggttatgatgtgtaattctttttatgtatttttgggcttgatttggtaatattttgttgaggatttctgcatctatgttactaagtggattttttttttagttttccttttttgtagtaactatctgttttcatttaaacttctattttaggtttgggggaacatatgaaggtttgttacgtaggtaaactcatgtcacaggggtttgtttacatattatttcatcacccagctattaagcccagtacccaatagttatcttttttgctcatctccctcttcccaccctccaccctcaagtagacccagtgtctcttgtttcagtctttgtgttcataaattattatatttagctcccaccgataagtgagaacatatggtatttggttttctgttcttgcattagtttgctaaggatgatagcctccagctccatccatgttccctcaaaagacaatctcattcttttttatggctgcatagtattccgtggtgtatatgtaccatatttcgtttaaccaatcatttgtcattgacaggcctatagatttattccgtgtctttgctattgtgtatagtgctgcagtgaacatttgagtgcatgtgtctttatggtagaatgatttatattcctctggttttatacccagtaatgggattgctaggtcaaatggtagttctgcttttagctctttgaggaatcaccatactgctttccacaatgattgaactaatttacattcccaccaacagtgtataagcattcccttttctccacaaccttgccagcatctattatttttgactttttaataatagccatgctgactggcatgagatgttatctcattgtgattttgatttgcatttctctagtcatcagtgatattcacctttttttatatgtttattgaccagatgtatgtcttctgttgagaagtctctgtttatgtcctttgtccacttttaaatgggggttgtttgtttttcttttgtaaatttgtttaaattccttatagatgttggatattagacctttgtcagatgcatagtttgcaaatattttctcccattctgtaggttgtccatttgttctgttgatattttcttttgctatgcagaagctcttaagtttaattagatcccacttgtcaatttttgcttttgatgtgattgcttttggtgtcttagttgtaaaatctttgccttttcctatgtccaggatagcattgcctaggttgtattctagagtttttattgttttgggttttacatttaaatctttaatccaccttgagttgatttttgtatatggtgtaaggaaggggtccagcttcagtcttctgcatatggctagccagttatcccagcaccatttattgaatagggagtcttttccccattgcttctttttttcagctttgtcgaagatcagattgttatagatgtgtagccttatttcctggctttctattctgttccattggtctatgtgcctgtttttgtatcagtaccatgctgttttggttactgtagccttgtaatatagtttgaagttgagtaacatgatgcctccagctttgttctttttgcttaggattgccttggctactcagggtcttttttggttccacatgaattttaaaatagttttttctagttctgtgaagaatgtcattggtagtttgataggaatagcattgaatctgtaaattgctttgggcagtataaccattttaatgatatcaattcttcctatccatgagcatgggatgttttttccatttgtttgtgtcttctctgatttctttgagcagtgttttgtaaacctcattatagatatctttcacctccctgattatctgtattcctaggtattttattctttttgtggcacttatgaatgggattgcctttctgatttgactcttgttttggctgttgttgatgtatagaaatgctagtgatttttgtacattgattttgtatcctgcaaatttgctgaagttgtttctcagctggaagtgcttttgggctgagactctgtggttttctagatatagaataatgttgtctgccaatagagacagtttgatttcccctcgttgtatttggatgcgcttttttctttctcctgcctgattgctctggctaggacttccaatactatgttgagtgaagtggtaagagagggcatccttgtcctgtgccagttttcaaggggaatgcttccaactttttcccattcagtaaaatgttagctgtgggtttgtcacaaatggcttttattgttttgaggtatgtccttcaatgcctagtttattgagagtttttaacatgaaggggtgttgaattttatgtaaagccctttcttcatctgttgaggtaatcatgtggtttttgtctagttttgtttatgtggtgaatcacatttagcaaataaaaacaagtctgcttatattgaacctaccttgcatcccgaggatgaagcctacttgatcatgctagattagctttttgatgtgctgctggattctgtttgcaagtattttgtttgaattattgcacagatgttcatcaaggatattgacctgaagttttctttttttgttgtgtctctgacaggttttggtatcaagatgatgctggcctcatagattaagttggggaggagcctctctcaattttttggaatggtatctgtaggaatggtaccagtttttctttgtacatctcatagaatttgactgtgaatccatcaggtcctgggctttttttttggttggtaggctatttattactgattcaattttggagcttgctgttggtctgttcggagaatcgatttcttcctgactgagtattagaggatgtatgtgtccaggaatttatctatttcctctaggtttcctagtttttgtgcatagaggtgttagtagtcgtttctgatggttgtttttatttctgtgggttaagtagtaacattccctttagcatttctaattgtgtttatttggatcttctctcttttctttctattagtctagttagaggcctgtcttattaattttttcaaaaaatcaactcctggattcattgttcttttgaatggtcttttgtgtctcaatttccttcagttaagctttaatttttgatatttctcatcttctgctagctttgggattgatttgttcttgcttctctaattatttcagttgtaaattcaggttgttaatttgagatcattccaactttttgatgtaggcattaagtgctatgaatttccctcttaacgcaggcttggctgtgtcccagagattctggtgtgttgtatctgtgttctcattattttcaaagaacttcttgatttctgccttagttttattatttacccaaaagtcattcaggagtatgttgtttaatttccatgtaattgcatggtttttgagtgatttttcatagtcaacttctatttttattgtagtgtggttcaaggttgtgtttagtattatttcagttctttttcatttgtagaggattattttatgtccaattatatggtctattttagagtacatgccctgtagcaaggagaagaatgtatattttgttgattctggatggagaattctgtaagggtctatcagatccattttgtccatgtcgagtttaggttctgaatatctttgttaattttctaccttgttgatctgtctaatactgtcatgggagtgttgaagtctcttcctattatcatgtgggagtctatgtctctttgtaagtctctaagaacttcctttatgaatctgggtgctcctgtgttgggtgcatatatgtttaggatagtcttcttgttgaattgaatccttcaccattatgtaatgcccttcttgtcttttttgatatttgttggtttgacatctgttttgtctgaaattaggattgctatccctgcttttgcctgttttccatttgtttggtagattttcctctatccctttattttgagcctatgattgtcattacatgtgagatagcatgtaatgacaagacagcatactattagttcttgcttttttatccactttgccactctgtgccttgttgagtgggacatttggtccatttacattccaggttagtattgatatgtgtggatttgatcctattattgtgctgttagctggttattacataggcttgtttgtgtggttgctttacagtgacactggtccatgtgtttaagtgtgtttttgttttagctggtagtggtctttcctttctatatttcatgttcctgtcaagatctcttttaaggcagatctggtggtaatgaattccctcaacattttcttatctgaaaattatcttgttcctccttcacttacgaagcttagtttggctgtatatgaaattcttggttgaagattttttctttaagaatgttgagtataggcccccaatctcttctggcttatagggtttcagctgggaggttcactgttatcctgatgatgttttctttgtaggtgacctgccctgtctctctagttgcctttgaagttctttctttcattttgaccttggaaaatctgacagttatggccttaggataatcttcttgggtagaatcttgcaggagttctctgtatttcctgaatttgactgttggcctctctagcaaggttggtgaagtttttatggacaatatcctgaaatatgttttccaagttatttgctatctcctcttccctttcagggatgccagtgatttgtagatttggcatctttacataaacccatatttcttggaggttttgttcatccctttttattctttaatttatttttttctgattgtcttatttcagagaaccattcttcaagttctgagatacttttctcagcttggtttattctgcagttaatacttgtgactgcattcttgtattgtgttactcatttctgtcagactcattagattctttttatactggctattttgtccttcagctcctttttgccttattgtgattcttattttcttggatcgggttttgtcattctccagaatcttgatgatctctgttcctgtccatattctgaattttatttctgtcattacagcccgttcagcctggccatttggaggacatatggcactctggccattttagttaccacaaagttcttgtgttggttctttcccatctctgtgtgtgggtgttccttttaatggcagtatagattgagtacagtcaatagacttcttttttggatgctttcaccaggctgaggctttgtgcaaggtctttatttgaagctgcctttttgtctctggtttaagaggatgatatgttagtgaggtatttttggtgttgaagctttagggtgtgatccagcaggtggcacttaggcttattggtcagttggtagactcttgctcagtcatgtggctcccctatgtttcctcacagttacagccgtgttctctctcaatgctctgaaagtgtgggatcctctcccccttgagtgctggctgtagatcatgacttggtactccttggctgcccactgcagctctggggtgatctgtgtttatctttcttccccaacttggagacaacagaggaagggaagttagtagtggtcatggtctagggttgtttgcttgactcctggggccttcaccccaaagagatgcaggtcaacaattgctcagtgcaatcagcccagaatagagggtctgtgctatgggcccaagccaggggttccctgtgtggtgatgagcagtgggggatgtgtgggacccatgggagatggattggcctcctctccttgggttgactacagcttgttgtagtgtgaataaggcacttagggtttttactccttcattagtgcaagggtagcaagggcagttccactgcaaaggcaatggcagagaggctttcagttgcccctgggggcctggtccaaggaatttccgaattgctactggctcgatagctctggcaggggttggctggaggcccaggcctggaggacctgtctagtgaggagatatgggaacggacacccatgtaacagtctgtctacttttctatagggctgctgtggcatgctttggttccactccaatttctagttgccttggattttcctgtacctgggggtatcaccagtgaaggtgcttccctgcaagaaggaggttcccctggctccgtgttgctcccgggtgggccattgtcctgtcttgcttttctttattctctgtggatcaagttattttcttgattagccccaatgtgagtacctggatgtttcagttgaagttgttgtatttacttgccctgttcattcctctccatgagaggcatgcacactagctacttctagtaagccatcttgctttatctggttttgattttagagtaatactagcctcataggatgagttaggaagtgttccttctgtttttatttaaaagagtttgtaaagaattggtataatttcttctctaaatgtttggtgcaattcatctgtgaaaccatctaggcctggtgctttattttttgaagattattagttattgaatcaatttatgtaatagatctaggcctattgagattatctatttctctttatgtgagttttactagattatgtctttcaaggaattggttaatcacgctttcaaatatcctacttattacccatatatacttttgatatgatatatttcacacttcattactttatatatgtatttcttttactaaattgtggggttcttgaaggtacaaaccatgtttttaaattttgcctccttaagacttagcgcggtaactggacatttcaaccaatgttgactgaaatgaactgaatttctccagattgtcaactgggcgtgagaactatgtctgagaacaccacagatataagaagaagaacataagactattatttatattatagattttacatttgataaaggtttaatctaccaagttcttttaactggtttgtttctgtgtagcattttaatgttggactgtagacaatttactgcttgagaaaaggttgactgagagtgaatcagggatatctgaagttaaagagtttaattcaaagtgatgatgtttatcattgaaggaagtattactagaattataaaaatgtgactcacccttttccaaatttctagaaattatctgttgcataaaacagaacacacctgaatagacacaataaccatataactggggctctactggggctaacggatcattaaaaattacaaaacaggaagttagacttgtaatttaaacttctgcttagtctttggctgtaattaaatattatgttcaggacaaagaatgagctggagggtctcttcaatctctgctgtgatctgctaactgctattgtttaattgaggtacctcgtgttccccaaaggctgagccacaagctgctctttccagacgctgtgtttagattccttgtgagccctcaagtgctgcatccgctgagaattggtgttgcatttcattgatgtgttccgcctcttttggtcagataaaccgaagcataaacattgtgctgacaaacccgggtcgcagagtggtttttggtcgctgaactgcccaagcagattattaagggaacagcattttagcagcaacagcaagttgtttatatgatatctgatcccagacattttgcatatctttaacatgatatgaatctatttttgaggtttgtaatgattatggtaaacaaccagatttccttgtgaagtagactcatgttatttctcagaatttatcacattatttatctgtatttcttccctgtagtctgtgaagttagcttttgtataatagggtgtgtgtatttatttacaagaaaattactctatgtgttaaaataatgtttagccttgttttcttcttattattaaatagtgtgttctatatgggttggtaccagactaaaatttgtataatcactcagcaaaaaggctaaatgttataatgtataaattctgatgtaagtttgatggttaaattggttatttatgttgtgtataaggtttgcaaggctacttaaccagcttgattcttcatttccatcactataaagtggataaaactgtatgccacatttttaaaggtgaaaagattattgatatttttatgtaaaatggctggtaccaagggtgtcattgctattaaacatatacttctgcaggcagaggtttttactgtcatgaaaaagattttcttagcagtatgcaacatctcccagtgctatggcatattttgacagagaccaggtgtgctacttttcttctgtataattgagccatgtcaaggaaacatcacaatataatggcctttgtgaatttattttgaaacttaaaactggcatatttttggtatgttttattgtttttagtgatattgtcttctagaaccttaactattttgcataaactgatacaagcagtgcattatttgtttgttctcaaaaaatacacctaattgtgttaatataagactaagaggactagtgcagtgctcctaaaatagcagtgtggagacctaacagcaattatttttgtatttccagacttgaattatttccacttccatagaataaaatttctgttcccctcttgagcatcactacttgaacaacttgcaggcctctgaaactcagcccactcaaaactcaccaaaactaaattggtttattttttgcctttgcctccatgccctgcaaacctattgctcttctgcatgttctatctttgctaatggcctcagcagccacacgtttctcccaaactacacgtcctcagagtccctgtgggtgtatctttctccttctaaaaaaacagtatattaaacttgccttcaaatcctgatggtcttttctttctcaaatacggtccctcctctcaatcttctggctcagaccacatgcttaccataatgtctctgggccattacagcggcatcctgaatgttctaccctccacaccacattgtgattataaaaacacagatgtgatcatgtcacttccctgggcaaaacatctgctgcctcttgattgtccactacatgggacagtgttttacaagttacaggttgcaggcttttaataagtagtgaattcaaattagtgaattacattcagctattaaaatataatggaaaagaaaatagtagagtgtatcacatttagtaaagacattgttctgtgaaactctgttctagttgtatttttctgtataaacgtgcatgtgttttggtactgtttcatgatgtaaaatgtacttctgatcatgggtaatagtcttgaaagtttgaaaaccatcagaatagagggtaaattcaaactttttatcagggcataatcttttataatcttcccaggttaccttttgctatcatctctagccacctccttggagaagcctattcctatttccatttcaagaacacactatatttccctggcatgaactttgcctttattcaagctagctcgtctaaatggactaccagttcttacactttttagtctcaggatctgtttaaactcttaaaaatattgaataccccttaggagctttgtttaagtggactataaactacatttatcaacacgaaacataccataaattaaaatggagaattttaagaaacatgtattaatattaaaaataataatgaatcccttatatgttatcctaagtgatacatttttgtgaaaaaaatctgtattttccaaaacaaaacaaaattagaagagtgacattgctttatatttttgcacatctctttaatgtctgaattaacagaagacagattcccatatctgcttctgtgttcactctattgctatgtgttgttttggttgaatgatatgaagaaaattcagcctgtaatgaatatatagtcgggaaaggaatgagtattttgataaccttttcagattattttgtagatattcttctttaatactacaccaaaactcaacaagtgatagttccttaaacattagttgcaatgagtctgataccctaccaattaacttttcacagtacatgacattaaaatctattgataagtctcctttgcaccttgaatggatcttttacccatgcatgaatttgcagtatcatgtgttggtcatttgaagcatattggttccctgaataatatgtaaatcttccaaattttcactcatttcattatacatcaaaaaattacattagtttatatcaccactgattgcatcaaataagtctttaaatattgggatgctttcaagcttactatgacagatacaagttttgcaaaattcgaatttttacttacaggctgtaattttaggattggaatccaatactatcagctgttttccttgacatgttatacaactgaattaaggtttcatgggacagtaaccacagcttgtgatacatttgaattactgtagtttgtcagtgattctttcaagtaaatatagtgttttttgaaaaaagcacaactcaaacaatcacacaagtgtttttccttgaaacaagcattgaactgcaggaagcagaagaaatgttttatgtctacttcctcttttctttgcacagatattaaaaagtcacatattaaaaggtcaagattgttaaaaattaataatttttactgttgtatcaaggatttgcctaaataatactgctttttttttcttttactgcaagtacctggcattgaagaacaccactgcaggtacaatttggtgccactgctgtcttgtgctaaggcaccagcagttttacccaccttttcttctgcaccatcagtgcaaacgtcaacatagtggaaaaggcaaataagaagttaatattattatgagatagtcttcctatgggccttttatctgggtaccctaaaaagatcttgctgacacccaggagctgttgtttatactttgagaactgctgacctgaagtatcttctctaaacctatttcgtacttggaaaatttgtattcagacctaaagatcaggctcaaatgttatatactttgtgaagcttactgaagctccccagattaatttgtcactactcctctgagtttctgtatattgtagtccctatcacatttctctttgtccatgaggtgctcctgttacagactgagctttatttctctaccacccacaaatgcctggtagatgctcaggatttcttaaggagcagaagcctgtacccactcattacacattctggcttttgttattctcccccaagtctaacacaggtcagaaggagaataattactgcctgaggcaagtaattttctgaggcaagcagggacatttcaccaacatgtccttagtgctacttccacaggtatcagaaaacactgacgtgatgcctagggttccagtgttatattgacattgtgacactaatgcagatagcaccaaaaaagctactgttcaataagtgtgtgaatagttcccctgtattctttagtccaaaccttgatacaggtcaaaaggtcattttaggtaactccaccctaactgaagatgcccttggatctcctagttctcatataattttcatgggaacttaattgaatattttttaaagttttatttcttatttttgttctagaaacatttgtttagcatttaccatgtgtcaggtgctcagcattcaaaggtaggcaggacatgaactctgctttcaaggcagagtaacagggagagcaacaggagaaaggcattgaatttggttctcagatttatactgcttttattttctgtattttgaaatttggaagttaagtgagttttcttgtttctttgtttttatgtgtatgctttattaatgaatgcttagattataaaggttgtcgtagatatttcagttgtaaatgtccttctcctcctgtgtttaaaacagtgttgagtttgtttttggaaatctgagtttcagagtaaggcttctagaatttaaaaaatcaccttaatatattatttacaaaaatatatcatagtatctcagcattgatttttcaactttatattagcttcatgctttttagagaatacaaagaaagtgtgtacttctttaagtgtaatatttcttttttaaaaaactgcctttacttccattttgagttatacagtaacaatgctaagtttgtatagctttatgtagaaagtgaaaaaaaaaatccttgcttgtccaaagagtttactattttttgaatgagacagaacaagcacaaagatgtttatataaacccaagtgagaattttgactgatagtatctcaactacaaattgcagtttttccgcaagatttagaagagaggagaccacaagtagtagaagacagaaaacagacacagcagaacttttggctttgctctttaaatgtaaggatctacttctaaaatcagtcctcatgtatttttatctagatcatgttttgctgatgtgatgattaattttatgcatcaacttggctaggccactatacccagaaatttggtcaaacaccagtctaaatgtcactgtaagggtattttttagattagattagcatttaaattaatagatttagagtaaagcaggtttaccctccataatgtaggtggggtttatcaatcagttgaaggctaagtctgagatctccgaggaaaagtggatttgccttcagattcaagctgcagcatcaactcttttctgggtctccggcttttcatccttttgtgcagattttggacttcccagcctccataaccatgagagcaaattcattaaaataagctatttctacataccctatttgctttctagaaagctccaatagggtacaggaagcttgcccatgtatttggtcttacgttagcccaaggaacaagatgctgccttcctctccgctactccttgacactgctaggcttagtctcttggaagtcataataatgtatcattttcagatgacaatgcagatttcaaagcacttgcacgtttgtgcatgatcaactatttctgtagaagtattcagaaagagtgaggactagggacccatggggaaaataaaatttgttgaaatacatggatccaggtagaaaggaagcgactggtggaagaagcaacagaagagagaaggttgggaaagctctgtcatgtgctgagttgtgtgtgtcccccacccccaaattcatatggtgaagctctaaccctcagtgccagaatgttactgtatttgaagataaggtctttaaacaggtgattaagttaaaatgaggtaatcacaggggaccctaatccagtttgactgatatccttataagaagagtaattttgacatacaatgagacaccaaggtccccacacagaggaaaaaccctgtgagggcacagcaagaaggtagttatctgcaagccaaggggagaggcctcaggagaaatcaaacctgctgacaccttgatcttggacttctagccttcagaatcatgagaaaatcattttacattgtttaatccacccagtctgtggtgtattgttatggtagccctagcaaaataatacaggcaccaagggtgaatattgatcatttttcaactttacttatactagatatgattctggtttattaaacatttctgtttacccaggagccaagtgagtggttctcaagaactaccctggatagactacactgactggtctctgaggccagggtgattattgctatttgcattaagcaaggagaagactcttccatatctcccaagggcccaatagcaatgcacttctgtgtctgacggtgctcctaccttggtccatgctgatccacaactgcagctccagaaatggcttgtaagcacatataaccagtgagccatacattacagggcacttcaaacagcccagtgatttttcagtctaatatttcccaggccatttttttcctcatctggaaaatgcagttactgatgtctgggtttaaatagctaagtagatttgtaaaatttaaaaaattaaaataattttaaagattattaattgtaagatgatataatacaaccatcaaaatgcactagcaagtgattctttattgttttgatgcttttccattttaatagtaataattacataataataatattgtagctaacacttactgtttactgtgtgccaaacaccattctaacctcattacaagatgttaaatttgaaatatgttgacatagactgtctcatttaattcttgtaacaaagatgtgagttaggtaaggaaggaattattcccattttgcagatgagaaagttgagacttagcaaagttcacttttttaaatcaaggttacccttctagtaaatggcagagtttgaagcataatttaagtcttcagattcctaagttactgatttttgcaaacaattctcttataaatgacatcaaatatataggtaattaagagtaagagagcgtgcttttttttttttttttttttttttgcctgtttgcgttctgaacaaagaaatgtgggactcagtaaggtgagaaaaatgacatttgcctccctaaaggatcactaacatttagcccttgcaggaagaactgaggttgaagaatggagtccaagaagcacaatgtttctaacaccaggagctgtatggattggggatcagaaggaagctgagctggaacttaagatgcctaaagagcaagaagggattattaagccagtacaagaataataaagtataaagttacatctgaacaaatcaaaaagcctatacagggaaccaagatataatgtgaaacaaaacactaagaaaaccttttctttcatttttttatttgtaagatgaattcaatttatagaaggcaaaatatgttcaaaaagaaaagttgtgcctttgagagacagaagaaagcagataacatatgtctgtggaaaatccgaggcttcaacatacatcagcatgtcctttaaggtataaattgtgttggtttctatacttagatttcattcctagcgatagcaaaagccaagtgtgagggaagagtttagagataaacatgatagagaaggaaataaagggcattttttacatccagcgatttcagccatccttccctccctcaaaacaaaaattctgacaaatttaagaaatttatgattgctattgcagccaaagggcagttgagtaaacggaaatatatcttacagtttgtttccaaaagttaaaaaatattatcataattccttttggtgatttcagtatctcaggtaggatagaatcaaccctatctataaagatatttaggaagcaaagtagcattattgcttaacaaataccttgactaactaattaaggcttcagaaaaagaagacagagagcgagatttttctgattatcatcactccgtaattactagtattttccataacctaggtaactcagctgtctaagaaacaaaatccagctgaaactgaaccgtctaaagttttccttctacaattttttaaggcccagcgcaggatccctgtcatgctaaagtctctcctggatgtctggaaaaagtcttatagtctgggagacattccaaaatatgtgcagtgaccattgccacaggcgtgaacttcttaatgcattttgcagaaatctcctccacaatgaaattgattactgtctgaaaggatttttttccccttttcaaaatagcaagcagctagaatatgcttttcttatgttttattacatccttaagtatctcatgtggactgaatgtgactggagaaagttaccggtctgaatctgatacataatgtctagtttaaaacaatttttttacattgatgggttagatgaacagcgaaaggaaaaactctggatgtttgaagactacacatacaaaattgtacactgattactaaaacttgagtttctgcacagttttcctgctgcagaaactgaaataagatcagagaataaatgtgaagaaatggattttcaaggaacaggtggaaattgaaaagaaaatggaacctggagttttgtgagtgtgtctgtctgccttatgagaatgacatttatgaggatgaaggagggttggagggtttgttgtaatgcttttacataatcaagatcaaattgttcaagctctttaatgttatctatttgttgtatttagcaaaggaatgaatttgtagctaataggcagtaatttggtttttattcacctaatagaaatattgtagcagagctgtcaccaggcttgttgtaatgtcaaacaaaaagtctgataaatgagaaaaaaaggatatacagggaatatattgcaattgcaatcatagcaaagaaagaacagaaaggatgtcgattatgagatttctaattcttgattttgtagcagtttccatattcttgctagaagctggaaagttgctcagtccctggtatcaatcacacctcagctagacactgaggctagtcactgctgctggaagatttcttcctgacaatgattcatatgagccaattgtcaggagttttgaagttctgaaatagaagttgatgtatgtcttttactgtggtgcagtcactgaacatatttcatatgacggaaaatagctttgcagaaaaattaacctattccttatctttaaacaacgttgccttcaaaaattaccaactcattcacaagcattacattttctgagcttttcacatttcttaatcttatggtgcacagtcaccacaggagaaggtgtgatatgtcatttaaaaagcccaaacctttcgctttgtattgtcacaaggaactaaaaacaaggcaaataagtgtttcaacttatgctcttagaaattatttcttaaataccacaaactgatttgggtatatcacaaggaaagatcagataattctaatccatgctgaacatgtgattttgaaacagaaacagtaaagatgaaaggtgaaagctcccatagtaggaccagtactggaagagagagagagtgctttttgactgatgtactctcgccttacctgagtcttttggtgtgaaatcatggtcttttagcactggaacaaaccttagagatcgtcgtgtagtcaaacatcttttttttgtagatgaaggaaactaaggactggaaaggtgaactaagttgcccaggtcaaagagctacttggaggaagaaaatctgaatctcaagaagttggtttgcaaacttctaagtccagtgttctttcttctctttccacacactgtttcttccactgaactcttcctctgaacaacaggagagcagcagcagtaataagtccagcaccatcaggtccgggccacagctgatttttagaggaggccccttgcacacaaaccaagtttgcttctggccaatagacctagaaattacaggctgatcttgctttactcctctatacgtgcttcagaaatgacttctttgcagaaactgtgttggcatggttaattaaaaagcattgttagaagagggcacaaggggagtgtcattccaggtgctggtaatgttctgtttcttgatctggatgtgggttacatgggaacattcagtttgtggaaattatgtgatgtatatttctggatatttcaacaaaaagttaaacaaagcttacagaacaattaagaatccattgttacaaaaaaaaaaaaaaaaaaaaagcctattggtggccgggcatagtggctcacacctgtaatcctagcgcttcaggaggccaaggcaggtagatcatgagatcaggagtttgaaccagactggccaacatagtgaaaccccgtctctactgaaaaagcaaaaaattagcgaggcatggtggcaggtggctgtaatcccagctatcgggaggctgaggcaggagcatagcttgaacgtgggaggtagaggttgtgctgaaccaagatcatgtcactgcactccagcctgggcaagagagcaagactctgtctcaaaaaaaaaaaaagcatattggcatcagagaaattaaatacctctagaaatgattctgcaagcacattttaacaatttttaaacaaaattttaaacaaaaacagccatcattatttggcatagcaagagttttactgtaaagcaaatttaatcactccttcaggtagaaacgttttcctgatactgtggccttccttcatactgtgtaactgccaaaggaatcacttaaaaataaaagctattatatgcttcttacatctttagacaatgggaattattctaaattacagctgacagaaagcattttttctattcttcatttgactttgtgttgtatatctaaggacttgagaaattgatttcaaaatttcatggtaacttgtcataatccttatggaggaaaataaaacatagaagttggtctggctgggcaatatattgtcctacttgtttaactattgctgttaacaaagaaaagtttaggagggatagcattaggagatatacctaatgtaaatgttacgagttaatgggtgcagcacaccaacatggcacatgtatacatatgtaacaaacctgcacgttgtgcacatgtaccctagaacttaaagtataataaaaaaaaagaaaaaaaagtttggatacatatacatacatatgtacatatatacacatacacacacctcatcccccccacacacaaataattggcatacggtgaatatattttaccactaaagctgtactaaacataattagatatgtttgggataagtcagaagtattttcgaatcttacagtaacttaattattatatactatagttaatatcctgcagctataaaaatgactgggaacaagctaggatataaatttaaaagtaaatgcataggagtgtgggtatagaaagatcgctgaaaaaattaatacttataaatcagccattttttttcaatagtaacactgagagaatgagaaaatacctgcaattagtgtattttaaattagtccttctttccttttacagctgccagtggagggcatattgatcagagaaaggaccaaatagacaaaaatgcagaaaacagatctatggtgtaaagtgccgaagtaattgatccttacctagtaaatattcacatatgttaacgtaagttaatactgttaggaaactgagaccaatttcataaacaatatgcaactatttggaaatttcaattatagatgctcaacaaatatcaagtaagcacatttaaacctaaagacgagtgttcggatatttcagtggaacattttagtattggttctgactgtaataatcctggccaatatgtgtagactcttttagtagtcattgtttccaagctgattgggcagagaccatgtctattgcacttttgaatagcaacttgaatcctcttggcttctggaacatataaaataacaatgttctccagaaatgctgccatttggtaacttctctttggagtgcaaacttaaattcttggttataagtagtatgtgcatatgccccggtgtccacatgcacagatctctatgggcatcaaataaggtatgcttgctgggaaatagaatgatttttgaatgcataagaacccaaagaggatgacataaacttagcgaagttttcaagctccagtctttattatgtatgtatgttttaaattaaggagcaatccaaaggttgaaaatcagggaaatcagaggcagttaattttatcagagaaaaaaattggaagataaaagctttggaagatatcagagcaaaaattggaagataaaaaaatgagaggaatagcaaaaacaaatttttaaggtaaaactataaattttcttttgaaattgtacatattcgttggactcaatagtcatcttctcttactggaactaactaagagttagtccctgtgactgcttacaaggcagagccaggtaattgatgcgtcagaaacctagctgttgaaccactgtgtgaatctttaggccatgaggcttaattctaattttaagcagatttggctcttataaatcctaaagagttataaagccttgagttattttcttgaaaatatctgataattcaatttataatttattcttaacactctctttaaaaaaaaaagaaagaaaacttaaagtataataataataaaattaaaaaaaaaaaaaagaaaagtaagggaccagatcaggggtagaacaaagctgcagacatatatttttcaaacctgctgtcaaggaaatcagaggcataagaaaacttgaacagaatcaagaaatttaccatttagttataaaattagatgcagcattccatatctcatccaaatataataatctattgggaaatcatattcaggagtggcttctccatcgaaggtataattcccttggaagattcacatgtattttatacagtttatccctaaaaatgtttaaagacaagtctgtgtaaaatgtgaagtacttgacttccttattagtgactttatctgaggcatggtctaccatagtagtgattacactgcccattaaccagtgagtattgatctatttattcctgaaaattttccctccccatttaaaaataagcagaaataaaaacctggcttcgtcatttgtgatggatgctaaagtcatgactagataaaagacttcaatttatcagtttatgtctgaagccgaaaactacttgttgatctcttaaattcaaaaggttacttggaaacactcaaggccaaattggagaaaaatgattaatccattttagtaagtgcttctttcttataaatggaatttaactccttgggcaaatgtaacgttctttttacttctgtgattgctaaagtttctttaggataaacatagaaaagaaatgggagtagagggaatacacacacacacatgcacacacacacacacacacacatgctgcaaccacacaaagcacaaagcaattgttgaatatgtctgtgacctttgtttatgttcatatttcaaagtcaagataagccaattttcccacctagagattttccctctgtaattggatatgtatctagatatttactatcataatggattctggaaatgacactaaaatttcatttcactaccagccaaccaaatttctgatctttcaaaaattaggtcatttaaaagctttgcaagaatctcagtttattaattggggtgacacatttatagttattggttacaatatcaatggaatctttcttaataaaacaatgttctcactataattatagtccacaagcactatgagccacatagtggcatttaagatgctctcaccttcttcagcctccttacacctcactcttagagcatcactactatcccttaaaatatggaaaggtggagaaatctttctgagcttgggcacttccactaactcttattttgctgctggtccctgtccctttgaggagcaacagcactaaaaagctactttcagagatccaaaaacaacatggttcgtggaaagccatgtattggtatggctggggcctgccaaccaattgtgttcagtcctttactctcagagatatttaaaatctcctactggctccttttgtgtagcggtaagtgaagattcaatgggacaaggctctaaatggactggaggcctcttttccattagagatgtgtttcctcatagacttttgtcttcacactttattttcttgtgcccactgcctcttattcgatcatttgttgtttctattctcaaactctctttcttcttctcctaattttgtttctgaaaatttagcctgtatcttacaatctactatataccaggcagtgctccactctctccttacttttttaactacagcctatcaaccaaagtttattctatggttgacttcctctcaggaaaaagactgagaggaatagacaaaactttgtaaagaaatgtatgggatggttgtgggagggaaatcacaatgagtgcatttggaaaaatacataaactacctgtcttcttatgttcatgatcatattttaaactagaatggttaacagctgtgtctttcctgaattattataagctagttttatagtgaataacattctatatttgttcagcgtattttagataatgaggtaggaaaaatttctgtagtatatttattcctgctaaaatagattatggtctatagaatctggttatccgctatttaaaatgtttcctacatgtttgagggtttcaaaagtgtccttttcatttgtggaatttaattctattctctagacataatctcagtgttatatcattacagagagtactttagtgaacagtcaaataggaagagagtaaaagaagaacactggcatgttgagccagactcttaagaaaagcaattaataagaaaatagctctgtagcccaatgagaattaaatagtgagattaatagaaactaaataattggatggtttgggtttggattatgtacatgaagatttttttttttaaagtgaaagaattttgttctttgttacactggtaacattaaaattaatgagtaagggtaaggaggactgaggaattgaggtaatttgtggtttcactgtaacaaggtgaagaagacaacttttggcaagttttttgttggcatatctgatttgcactaatatgatgttatttacaatatttatcccacttaagtgagtatttgcatattttactatagaaacgtgggggtttgtggtatatgatatatacaaaatattacctttataaattctaaaaaaaatctgaattctgaaatatatgtggctccaaggacttcagataaggaattgtggacttgcatatctattgactgttgggaggaaaactttaagaggtattatgagtgagctataacctcctctttaataagaagagtcagtaactgttgtctaaagtggttaagttgagaagtaaaagtataagcatataatatagtgttatggatcagaatatctaaagagaaattaaaagaaatttctctttgaagtagaggtaaagagggttggagcgggagacttgcttctcatcacaccttcttcaaaactatgaactgttatcatgtgcatgcattattaatactttagttttaaaaattaaattaattatttcaacaaacttgccttgagtttatgtaatgtgttaggcatggtatctggaagcgtgaaaattgaaacctttgtctgggcacaatggctcatgcctgtaatcgcagtgctttgggaggctgaggtaggagaattgcttgagcccaggaattcaagaccagcctgggcaacatagaaagatctcatctctacaaaaaataaaaaataaaagaaaactagctgggcatggtggcatgcacccctggtcccagctgttcaggaagctgatgtgagaagatcgcttgaaccccgaaggtcaaggctgcagtgagctgagattgcatcactgcactgcagtatcactgcactccagcctgggtgacagaggaataccctgtctcaaaaaaaaaaaaaaaaaaaaaaaaagaagacgctctcaagagttctaatatgtaaaatagacttgtaaacaatgaggcttgatatgaaacagtaaagtgatcatttttatagcattatatacagagaagacagtgactactattttccagctaagagagtgtacatctaggtgtgtatgagggtaatgggcctggtgaactgtaggagagggaagaggaaagtcagtcaagggagccttcacagaggtgctggacctttttagaacgcaaaagactcaatctgagaggcgtcagagggagacagacacaaggtgaagatgtagaaaagttcttgatggagagcactcttccatgccctccttgtagctagagaaaaccaggctgtagctcctttaatttaaatctgccttccccagcaaacaagaagctatttggatattttgttttgtttttcctgaagggtgacagtagagggtgggaaaggtacattttacataggagatttatatcttaattttactctcaaaatagaagaccctgagaaaatacacatgagcagggaattttttaaaagaaattcagtttaaagtcagctttttctagattgcaagtaagctgtgtagagtaagggaaacatggctcatctggccagggttctaaagtaggcaagctaactaaatctcacaggaggtcttcgaggagagcaaacccagaattcattgcattaatccagcctaaatattttaaggacatgaacaaatatgatgatgtcattgaagagaaagggttgtttgcttccatacccattttggcagctgtagcagctgtggtatctcttcaaacactcagattgtaggttaaaccctaaagttgagcctttgagtttcagggctagataggagtttcttgaaataccagccttctgatataacagaaattatgacagaggagctgtatacaaattggctataatggggagtgatcagatacattgtgaataaatacaatatacaaagagttaatattaaaaatatggagaatgggggaaaactcaaaaaagagagctcaagaatcaatgcttcaagtgcatgtagagttaagagtgcacatgggggaggcagtgaggcctctgacaggtggtaggggaagtaagttgacagatgagctttatatttcttgaaaattttctctttatctcagttcacagaggcggatgggaaaggaacagatgtcagaaacagcagtgattctcagggaagattaaatggtagaggaaatggagatcgcattaccaaataagatgggaagggaaagcagtgtgtttaagtagaactagacagaatgaccaggtggaatttggatttgaagttttaggggatatcatgttaaagcagtaaacaccaagctatcacaatctgacccgttgagattccattaattgataacgatgatgagtacttctttatttgttaataaaagcgtgccataaagaataggcacattaaagttttcatttaaaaatacatgtattgttccatttcagaattgttaagaagttgaaatattcttataacattagaaagaactaaggtttaggaagatttgggattacgtgagagttgcttgtatcacatcatgttacttttcattcaattttctccttcatcaatccctcttcccttctccccttttccttcttcattttttctccttatagggacatatggaggtatgggaactcagacgcagtattcaaagaaaaagaatgtattattaagaaacttggtcacattattattataaaagtatacattcactaagaaaacatttacataagaaaagtactcaattagatttctggtctatatataaaagatcttctcaaccaaaaacaacttgaggctggcatttagaaaacctgagctctagttctaccctatccctcattagccctatgacttcagacaaatcatatgccctctttggctctcagtttcttcaactgtgaagaagagcttagatcatgtctgtaatatatatgttttaattatttgaataccatagtctaggtggtgatcttaatgcaagcaaatgccgttcactttaacaatccacagggaagagatgggagagatggttccaagagcagaaaactatcttggtaaaggaattcctacatttttatccattcattctactaatactaagtaaacatctgctgtgatttcctatgcctgggaatgcatttcttccagatatccacattgcttattcccttgcctcctttagggcttcactgtgtggtcatctcgtgaggacttccttctttcctatttaaaattatgtgcatgcacacaccacactgtctctcttgctatctctctttctctctccaattctgggactccccattcctctttctgtgatttatttttcccaataacactaaatactttctaatattctaaaaagttacctatttattttattatttaaatcccccgtttgaaattaagataaagacaaagactttgtagggtttgttcaatgcatagaatagagtttatcacatagtaagccctcagtaacagagttcaagtcttaatcatcaagtagctgaggaattctagactcattgcgagtatattatttcaatgggaatagataaggagactaggaaagtcagagatagtaatggattcacaattctgattttcaaacatcttgagcaacaggatctttgtttctgacgaaaactcatgtagaagccacatgtgaagagttaagtgcagacttggtctaagtgaaacaggtgaaagaaacatggccacttgctttagctagaatcactacctaaactatggtattcacatcataaagaatgtacacgatggatatatgatccaagctcttgcttttctcctgcctcctcaaggtggtccctgaagaaattctgaacagattttctcaaagttgcctaatatcaaaaattacttggaacactggttaaaaacacagatcccctggggctttgcccctggaaaggaaagggaatataccaagaagttggtgaagaggccaaggtttgcatcaaggaaggtgattatagagaacaagaaacatctggattttccgaggctgaataaagagaaaggttagcaagaggacaggggtctacttagtaaagtcatttcaatggtggtcagtcacttacacttgtctcccacataagaagaaaaaattggatcctggtttgggctgagaattggatatgtttaaaaagagaaaaacaaagccatatttaggggtttgttttgttgaattttattattgacaatggcgccaaagaaccaacatacaaccacttgaactaaatagaacattaacagagttctaaacattcaaacatatgatgaagggaaaattccactagtcaaagatctcagaagagatataacttgctcattcaccgaaaacttgtacacaaacaaaatctagaaaaagatgtatgtatgattcttgtccttctctattatcagtttctttttaaattttttaagtgttattttgttttttacacatagtagttgtatatactatggggtgtaatgtgatgtttccatacacgtatacattgcataatgttcaaatcggggtaattagtatatccatcacctcaaacatttatcatttctttatagtgggtacattcaaaatcctctaactatttttaagtatacagtacaatattgttaactatagtcaccatactgtgcaatagagcaccaaaacttattcctcctgtctaactgtaactttgtatctgttgatctcttcccatcctgcccctaaccccacctctccagtctctggtatcagtttcttttttcttttcttttttttttttttttactatcaacagaacctcatcaaattatctcatttaatggtaccacctctccaggcatatcggcaggcaccaattggcaggcaccattgtatatccattctgtcataaaaaaaatcccatatatcactataaatttttgaccattagtctttatagttttttacattcgttgaaatataacttttctctgagagcatcatatcctcaaaactatctcaaatagagggtacttttgtctccattactccatctcctcttggatgtctcagattcctcagcatcaaaacatctaaactgaatctcatggctcccactgaacccatgacttgcctttatctattgttccctatttcagtgaatagcacctctatgtccaatccatcattcaatctctgttttacctactaaatagtttttaaatacatatactcttctattctccaaccaccttagtccaagaaaccactgtcttcttccttgattattgtaagagcttcgtacttgttctgtctacttctggccattctgtaagtcttctctaagtgtagctctcatcaatcacttccttgatattcccactgccacggtcccattgtgtcactttgtctgggccattggagtagccaacactccagttaccttagtctctgccatcttctatctacactatatttttataccagcttaatctccataaagcgtacatgtctcccaactgctttgctgcttactgaatttaatccaaacttcttagtttagtgttctcttgaccagtaataccttctccctatacctatgcctaccccaatcctacccaacatgcaagactcctgtggcttttcctgacctctattcagcctgataggctattctgccattagaactcacaacacagacttaactttcttgtgagcagtgtcttatcacatttatatcagcagacacaccttgcactgcccctttcatatagtgaatcctcaatgcacttaatgaattttagtacattttaattttatttgaataggtttttagactttgagtttcaggaaaaggctaaattactgaattcattttagtattgtggaaatcaaatggaaaccaccccacatatgaaaacatagctgtactctatttgttttatttcaaagtgatccaggtccttttaccaccagagaggaagaaagaggattaagctgaaattaatgttttgatgaagatgaggtggatggtaaattgacccgagggaagcaaaaaaaaatcaacttgccacatgttagcaaccgagacctcatgattgatgttcagtgacttggaaattctctccagggcaaactgcattttcactgcttacttacatacattttgaggcatagattaatttcaaaacaagaatttaaagctaggaggaacctcagacatcagcatagtttgtggttttcaaacttttctctccttttctgtttttaaacattagaacactttattcaatcaaaatcttccatgaaatcccattgtataaaataaataaaaccagagctgtcttggttaaagcagggtgcgagcccaggatccagccctcttgccttggggctctctagcttccatggtggcccctgaagcataacaagagaatctctagaaggctggtgatctcagtttgaaaaccaaggatctggtcttccctctcatttcttacaagtggaaacaggttcagagaagcgacatgatgtgcccagtggtagagtcaggactaggactcaggtttcctgccatgcaatgcagtattctcctccaattcctctttgctattttctttggtggcatgtccctcctgtttcttcttcctctttttttttttttttttttttttttgagatagtcttgctgtgtcgccaggctggagtgcagtggcactatcttggctcactgcaacttctgtctcccagattcaagtgattctcccttctcagcctcccgagtagctgggattacaggcgcaccaccacgcccagctaatttttgtatttttagtagagacggggtttaaccatgttggccaggatggtctcgatctcttgacctcatgatccacctgcctcggcctcccaaagtgctgggattacaggcatgagccaccgtacccgaccgtccctccttctaatgacctcaatttagtctttactttttcccagtgtcagcacatatgatccaaaaggccttctgaacttctatcaatattttgatagcttctattctcaactctttagtaactattaccaaatgaccattttttttttgccataactctatctcttaagatactaccatatttccctataaaaatgcattaacaagttggtaacatgttgaccatggtaacatcttgagcccaggagatggagtttacagtgaggtgtgattgtccactgcacttcagcctggtgacagagaaagaccctgtcccaaaaaataaatataaaaaattccaacatcttatctcaccattcagagaaaacctcttttaaacatctgtctttcaatgaaaatgcatgaattatatatatgatatatatatgaattatattatatacataaatagaattatgctatttgtgccattctacaatttgattctttcagtcaagaaaactcttggtgctctttccaccaaatatagatttattactctcttttatagttacacagtgtacttttgtatgaatttattgtaatttatttaaccagcatcctataagtttagtttctagtttgtaactattttttaatgctgtaataaacatcactatgcacatataattgcatccaataatcacctcaggataaattcatagaaaagaaaatgctgggtcaacagatatcttcattttaaattaaaatatctctaatatttattgtaaacaaaacctttaaacaaaacaagacagaacacagacaagtatcaaagtctcctccaaccccctagctgttatgccagtctccaaaagaaacctggtatagacttcagacctttagttcaatataaaactgtaaacatagatacttttaaaaaagatagtagattacagagtacatacttaactataacttatttttaaaccaaataatggattctgaccaaatttccacatcaggacatattgtactagctcttttcttttttggactgcagagtatttcatgcacagatgaaaggaagcaaaatgtggtggctaagagcatggaccctggagcctgctccctgccaccaggcatatgaccttaagtgtaagtcgctctgtgccctactctctacatttttaaacttcgatgataaatacctacttcataacattattggaagaattaaatgactaaatatattggaaatgcttagtacaataagcactcaaccaatgttaactattattaatatgtgtcataattttttagctagtccccatttgatgggcatttattttcagtttttcagcgataatgatgcaagtcatatttcatatatgtccatttgtgaaagcatttctttagggtatattactaaaaattaaaaatggatttactgggtcaaaataaagacacattttgtttcatttaaattttttaatttttttatttcaatagctctggggggaggtacaagtgttttttggtcacatggattgtatagtgtgaagttggggattttaatgcacccatctcccatgtagtatacactgtaccagtacgtagtttttcattcctcactcccctcccactctccccctctctgagtctccaatgtccattataccactttgtatgtccttgcatactcataacttagctctcacttacaagtgagaatatgcagcacttggtttttcattcctgagttagttcacttagaataatcaccccccagttacatccaagttgctgcaaataacatttcattctttttttttaatggctggatagtattttgtgatatatatatatatatatatatatatatatatatcacattttctttatccactcgtcagatgatggccacttaggctggttctatatctttgcggttgtgaattatgctatgataaacatacacatgcaagtgtctttttgatacagtaacttctcctttgggtagatgtagacacccagtagtggaattgctggattgaatggtagatatacttttgtttgagagatctccatactgttttccatagaggctgtactaatttacattccaaccagcagtgtataagtgtttcctttttaccacatccatgccaacatcaattgtcttttgactttttaataatggccattctggctggggtaaggtggtatctcattgtggttttaatttgcacttccttgatgattagtgatgttgaacattttttcatgttttttggccatttgtatatcttcttttgagaaatgaagatagatatattttgaattttgatgttttcacatccacccctcctccaaaaggctgtgccagttaatattccagccaatggtgtataaaaatatccatttcctcacatctggtcatagtggatattattagtctaatatacaagttcacacacatgtgtaattttaatgtgcatttctttggttattactgaagtttagtaacatgttttatttagcatttgtctttcattatctgagaactactaatactctccttgacacttttctattagggtgtttatttttttaaacagatttttaatggctctctgagtattatggctattaacttttattcatatatattgccaatacttttctcaatttatcatctgtttttcaattttgttcattattttgccatgaagaagtgtgtcattgctatgagtcttttatagtttcaggttttatgccaaatgtcttttttttttcttttaacttcaatcttcccaaattgtcatctattttgtactctggggctttgagatttgacctatctaaaatttctattttgtggggaagggtagatgagaagccagttgtcctaaaattatttgttcagaagtctggtttgtaatgccgcctttatcataaactaacttctcaggtcggtttcactctttcttcgctctcttctattcacctgacctgccagtggacttttaccacaggcttctgttgtctaatttttatattaaatttaaatcttaatatttgaagggcattttccctctgattacttttgttttctttggttattgtttagaattttcctggctatttgcaactgcctgttcttcaaatgaaatttacaatcattttgtcaagttacctctcataaaattgttccaaagtttttttgcctaagattttattatatcactgtataatttaaggagaatttagaactttaaatattgagatttctatccaagatctgtttctctatttcagctttgttatatatccctcagaataattttataaatgtattcatataagactgcacattttctggtaggtttatgaccagatgttttttagtagataccctacgttcatttaatggttgatttggagtgcagtcccacaagttgagtctaaagtgtgaaaataaattttttaaaatttttatcaatcattgtcaccaaagacctcttcttttgccactttctactatgaaacacactttttccaagtggctcaatgcaagctgtacctcagaatcctgtcatttctaaataacatcttatctatatgctatttccatgaaaagctagtttggccaagattttgctgtaaagtatccaacgagttaggctttcattatttttctggtcttacttaatgaagaaacacatctgggaaatcaatgagtatttgaactcactgggcttcataaacactctaaattcagtcaaccaaccattatgcttaattcacattcaaccaaccaacaattattgagacttagtatgttcagaattctagaactagaaacatttctctactctggagtgacttattgtgtaataggaaaaacaggtataaaacaaataattgaaatatatgttataaaacaatctgagaaagtcagtaagaactcacaatcaaatggcaattaaataactggtgaatgtatataagtgtctaattaagtagcatttatttgtaatgaacagcacactcagacagacacatgcccagctaaagcagtttctacaggatgtgatgtgaactctttttcccactctacatatgaaaatgttgtctttaataatcattagatctatcctatccataggtttaactctagcaataactttttgaatttaaaaacccaagtgattaatattttgtgagaatgattgagtccgtggcatggaataataactacatccttttcattacatagatatgtatgtatattataataacatagattatactacaaaacatacacgcacgccacacacacacacacatacatacatgtgtgcttcttggggtcctagaatttctagcttctcctcactgagaaactggtgaggagaatgctccttctgtcactgtccaaattgtgctgattcttctttgtgtatgccaccctgttctcttcttctgctggtctttgctaggacagtgtattgacatagaagttcattatttctctgcacagacaactcttatcctttgctcttgcttttattcaaagctccctctctagtgttactgaagggttttattttttaattctttcactaggggagtcaaaactattacttcctgcttaacctataactctgatgatggctttgccatgttgtcatggttttttgtttgtttgtttggcctatattctgagaattctgtgtatcttggctctgccccatgtgagaatgagcgagatttattatttcatggggacaaagctcttcattaggatacaaactataaaactgggttttttcaattgaacaaaattgtggatgtgataacacacccatgaaatttcactaaatcataactctgtcttcctcatctcagcatttaataaattaaattattcaattgattttgagaatttgactaaagctatggactctccctacctccttacaatatgtatgttttgtaaaagtttgcatatttttgtaggggattgattgttttgctgaacacttggtgctctattgatttcaggaaagaatcctttgtttaactacttcatgcccaatataggacacatgctatttgaaaatgagaaaaaataaatatagtaacagtgttttaacaaaattagaatgttccttcaaatgaatgttattttcttacttaccgtttctttttttattacagcttgaatgttaaatgtttcatgggtgtatagtacttcctctgtttactcattctctttgaccctcttcagcccattgcgagcacacttctgtttccagcactctaccaaaattgtggttctagtggttacttttctagccatatcctgctgcatttcttagaaataaatgtaactaacttctccctccatcttagaacacattctcctcttggcttccataacattacattttcctggtttttcccattctacttacttagtcccctttgactagtttgcccttcctctctcttacctctaaatgttgaaatgacatagatcttctcctcttttctgtcctcatacatcctctctagctgaactcatctaggagttcagctcctagatgagttcatctcatttaaataccatcaatatgccatatttatgtgactaccatagttatgtctccaactctgaactccaaacttggatatccaactaccctactggggggtgcctcccagttaggctacttggcggtcagggacccacttgaggaggcaatctgcctaactgggaggcacccccagtaggggcagactgacacctcacacggcctggtacccctctgagacaaaacttccagaggaacgatcaggcagcaacatttgctgttctgcagcctctgctgctgatacccaggcaaacagggtctggagtggacctccagcaaactccaacagaccttcagctgagggtcctgactcttagaaggaaaactaacaaacagaaaggacatccacaccaaaaacccatctgtacatcaccatcatcaaagaccaaaggtagataaaaccataaagatggggaaaaaacagagcagaaaaactgcaaattctaaaaatcagagcacctctcctcctccaaaggaacacagctcctcaccagcaatggaacaaagctggatggagaatgactttgacaagttgggagaagaaggcttcagatgatcaaacttctgcgagctaaaggaggaagttcgaacccatggcaaagaaattaaaaaccttaaaaaagattaggcaaatggataactagaataaccaatgcagagaagtccttaaaagacttgatggagctgaaaaccatggcacgagaactatgtgatgaatgcacaagcttcagtagccaattcgatcaaatggaagaaagggtatcagtgatggaagatcaaatgaatgaaatgaagcgagaagagaagtttagagaaaaaggaatagaaagaaacaaacaaagcctccaagaaatatgggactatgtgaaaagaccaaatctacatctgactggtgtacctgaaagtgacggggagaatggaaccaagttggaaaacactctgcaagatattatccataacaatattaaccttaaatgtaaatgggctaaatgctccaattaaaagacaaagactggcaaattggataaagagtcaagacccatcagtgtgctgtatcaggaaacccatctcacatgcagagacacacataggctcaaaataaagggatggaggaagatctaccaagcaaatggaaaacaaaaaaaggcaggggtttcaatcctaatctctgataaaacagactttaaaccaacaaagatcaaagagacaaagaaggccattacataatggtaaagggatcaattcaacaagaagagctaactatcctaaatatatgtgcacccaatacaggagcacccagattcataaagcaagtcctgagagacctacaaagagaattagactcccatacaataataatgggagactttaacaccccactgtcaacataagacagatcaacgagacagaaagttaacaaggatatccaggaactgaactccgctctgcaccaagcagacctaatagacatctacaggactctccaccccaaatcaacagaatatacattcttctcagcaccacaccacacttgttccaaaatcgaccacatagttggaaataaagcacttctcagcaaatgtaaaagaacagaaattataacaaactgtctctcagaccacagtgcaatcaagctagaactcaggattaagaaactcactcaaaaccgctcaactacatggaaactgaacaacctgctcctgaatgactactgggtacataatgaaatgaaggcagaagtaaagatgttctttgaaaccaacgaggacaaaggcacaacataccagaatctctgggacacatttaaagcagtgtgtagagggaaatttatagcactaaatgcccacaagagaaagcaggaaagatctaaaattgacaccctaacatcacaattaaaagaactagagaagcaagagcaaacacattcaaaagctagcagaaggcaagaaataactaagatcagagcagaactgaaggagatagagacacaaaaacccttcaaaaaatcagtgaatccagaacctagttttttgaaaagatcaacaaaattgatagaccactagcaagactaataaagaagaaaacagagaagaatcaaatagatgcaataaaaaatgataaaggggatatcatcagcaatcccacagaaatacaaactaccatcagagagtactataaacaactctctacacaaataaactagaaaatctagaagaaatggataaattcctggacacatacaccctcagaagactaaaccaggaagaagttgaatctctgaatagaccaataacaggctctgaaattgaggcaataatcaatagcttaccaaccaaaaaaagtccaggaccagacagattcacaaccgaattctaccagaggtacaaggaggaactgataccattccttctgaaactattccaatcaatagaaaaagagggaatcctccctaactcattttatgagtccagcatcatcctgataccaaagcctggcagagacacaacaaaaaaagagaattttagaccaatatccctgatgaacatcgatgcaaaaatcctcaataaaatactggcaaactgaatccagcaacacatcaaaaagcttatccaccatgatcaagtgggcttcatccctgggatgcaaggctggttcaacatatgcaaatcaataaatgtaatccagcatataaacagaaccaacgacaaaaaccacatgattatctcaatagatgcagaaaaggcctttgacaaaattcaacagcccttcacgctaaaaactctcaataaattaggtattgatgggacgtatctcaaaataataagagctatttatgataaacccacagtcaatatcatactgaatgggcaaaaactggaagcattccttttgaaaactggcacaagacagggatgccctctctcaccactcctattcaacatagtgttggaagttctggccagggcaatcaggcaggagaaggaaataaagggtattcaattaggaaaagaggaagtcaaattgtccctgtttgcagatgacatgattgtatatctagaaaacctcattgtctcagcccaaaatctccttaagctgataagcaacttcagcaaagtctcaggatataaaatcaatgtgcaaaaatcacaagcattcttacacaccaataacagacagagagccaaatcacgagtgaactcccattcacaattgcttcaaagagaataaaatacctaggaatccaacttacaaaagatgtgaaggacgtcttcaaggagaactacaaaccactgctcaacgaaataaaagaggatacaaatggaagaacattccatgctcatggataggaagaatcaatatcatgaaaatggccatactgcccaaggtaatttacagattcaatgccatccccatcaagctaccaatgactttcttcacagaattggaaaaagctactttaaagttcatatgcaaccaaaaaagagcccacattgccaagtcaatcctaagccaaaagaacaaagctggaggcatcacgctacctgacttcaaactatattacaaggctacagtaaccaaaacagcatggtactggtaccaaaacagagatatagaccaatggaacagaacagagccctcagaaataatgccacagatctacaccgatctgatcttcgacacctatttaataaatggtgctgggaaaactggctagccatatgtagaaagctgaaactggatcccttccttacaccttatacaaaaattaattcaagatggattaaagacttaaatgctagacctaaaaccataaaaaccctagaagaaaacctaggcagtaccattcaggacacaggcatgggcaaggacttcatgactaaaacaccaaaagcaatggcaacaaaagccaaaactgacaaatgggatctaattaaactaaagagcttctgcacagcaaaagaaactaccatcagagtgaacaggcaacctacagaatgggagaaaatttttgcaatctactcatctgacaaagggctaatatccagaatctacaaagaactcaaacaaatttacaagaaaaaaacaaccccatcaacaagtgggcaaaggatatgagcagacacttctcaaaagaagacatttatgcagccgaaagacacgtgaaaaaatgcttatcatcactggtcatcagagaaatgcaaatcaaaaccacaatgagataccatctcacaccagttagaatggcaatcattaaaaagtcaggaaacaacaggtgctggagaggatgtggagaaacaggaacacttttacactgttggtgggactgtacactagttcaaccattgtggaagtcagtgtggcgattcctcaggatctagaactagaaataccatttgacccagcaatcccattactggatatatacccaaaggattataagtcatgctgctgtaaagacacaggcagacgtatgtttattgcggcactattcacaatagcaaagacttggaacaaccaaaatgtccaacgatgatagactggattaagaaaatgtggcacatatacaccatggaatactatgaacccataaaaaatgatgagttcatgtcctttgtagggacatggatgaagctggaaaccatcattctcagcaaactatcgcaaggacaaaaaaccaaacaccgcatgttctcactcataggtgggaattgaacaatgagaacacttggatacaggaaggggaacataacacaccggggcctgttttggggtggggagagtggggagggatagcattaggagatatacctaatgctacatgacgagttaatgggtgcagcacaccaacatgacacatgtatacatatgtaacaaacctgcacgttgtgcacatgtaccctaaaacttaaagtataaaaaaaaataagtaaaaaacattgttagctattggggccatacaggcgtatgccaaatccaaatttagctcttgggactatagtttgccaatcagtgctccactccaaaatgtgttcccaaacctaactgttgctgtcctcaactactaaattacttagaaggatctctgtctccttcctcctctaccatgttagtctactctttggttttcctgctcttgcccctacctccaacccatagctccacagagcagctaagtgttcttttaaataagacgtgccatgtctcatgtcaaggaaaacttcctagaagaacctataaaaaataatgtagtacgatgtttttgttatacttcaagaattgagactttttcatggagagaaaagagagagaaggggtggtatttctagaaaggcaggatagctctgaccacttctagttttattttaatgaatgctgttacttgttaacattggtagttaaaaataagaaaagaatctgcgatttatcattgtatataatcattagggttttcatattgagatattattctggattataactcagtatttaagcttagagcaagtgaggaaaggaggagaaggaggaggaaaaggaaaggaaaaggaggggaagaagaagggggtagagaagaggacagagggaggaagaggagaatacatactctgttaactaaagtggaatgaaactcaatatttacatttacattgtttatctctctttgtgttgctctggttcttcattggtcttgtcttgcctgtgctaaactttttctatgacattaaagaggtctggtgtgaaaattgccactaccctacttccttgctattcctttctgtcagcttcttgaggatatctggatgtgaagcagcttttcttacccttggaacctttgtctacagttctcccttcctcttcctcttcctctatctcactcattctctcctgttttattaagggccgaacattattgtatcgtttcgccaatatttctaattcttctacagctctttagtttgcgccacacaactcagcattttaccaacccagtttcttaaaggaagcagataatttgcagcgaaattaaacataggttcaattacatatgtcagtatgaattagatgcatgttgctgagatattttcaagagttccttattaaaatagtacttcttccccctgaaaagatgaaaatgcttttgtatctattgcctctttgttctcataaagttaggtttatttttttttcttttttgaacttaaggattgaggttagtattattatccctgctttacatatggtgaaactgaagcagagagcaggaaaacaatctccccaaggacacccagtgtatgttccagccgtgcctgggcctcccaggttctgagggccagatctgcacttttctgctggtcttactgagggcagttagaagctaaagcaatttctaagctctgatccaaattatttgtaagtcaaggccatttgtttgtacctattttgaatacttcaaccctttcgagagaattccaaatacactttttctaaatcaatatctctaaaacttgggtaatgtacaaatatcttttaaaggatgagtcctcttggattctgaatggacacaaattgttttactcacaatgttacttaagtatttacaaacagaaaattcttttattttacatatccacaaacatatacatacattatgcttattgttctacatcaaaaaagccaaccaaaattacaggttaaatttaagtagaaccatattactgagaaactttagctgatcaacaacattaatgtgagagattatattcttttaggaaacataattagctgatcaaaagcaatgtgttcaggcatgggttctttggagactggcgttctcaggctcccctgtactgggtgaccccaccagtctgctgccactttcattctgttggaatgaaacttccatccactcaaggcattgtgatgtcactggaggaaagtacataactgatgtattgatgtctgcctctgccctttttttcattaccatactataaatacattactaccacttggtgcaaacacaagcactaaaattgaatggtggtgtccaattataaagtcatgccccagacagttcagcaaatctcttttactaatttttattagataccaacacaagatttctttttaattctcacaagaactcacagactctgggggtcagaggactacagttggagaaatactgccctacacttcctggtttaaggctgggagaagctgtcaagagttttcatgtccaaccttggattaagcagctacccactgggatgacttaagggcaacctaagccaagaacctcacccctactaatttgctagtgtacatgaataattcattccttgtaaatggaaggactgaacgactcaacttaaattcaaatatattacccaggaagaataattaataagagtttattctgtagcaggcattaatttattctaattatgcatgaaacaaagcctaggggaatgagacatgggataggtgagttttgttatcttcgtaagtcagcatgtattaagtacctgctagtatcagagatcggcagaggtaagcatgcagtcccattcatggtacctgaaatccagttggtaatacagaacaaatggaacgagaggggaagctttgttgggatataagagggagaaacctagaaactaggcagcagcaatagcagctgacccaggccatctctgtttgaagctaacagaaaaacaaagctgcctgaatggaagacttcaggataagaaaaaaaaaaaacaccctttcccactttacagttttctagccagtcttgagacccttgctcagtttttaatgtggaagaacattctgccacaaaaggcaaatgattctctaattgcggaattttcaattttcagtttcttccagaacttgcctttttccccaagtactttccttgacctcttctgcacaatccactgtgagtgcaaggggaagaaataagtaccccctctcagcctgtagtcacatcttccctctctctatatggctatggacgcagtcccagaattctggatttcttgcatgtctgcctttaataagaaagcagagtttaaataggctctcactattgtttcgctgcttcacaccctcctggtttgctattgttcatgttcaatgtgtgtttctctactaggtacataattaactttctatttttccctcacagttcaaaagcttacaagtataaaagcttgctgttgtaaatacattgaagagagaacaccatactgtgtttatgggtgggaagatggctagaaaattttttccaaggaaaaggaaataaacatgtatccgaagtccctgaatacacggtcatctgcatggtctcaaatctccataccctctctgaggcatgaattatcacctccatacagggagaagagaaatcgaggaacttacagaaggttcacatagctagtgtcagagctcctatgtgaacctctatgttaactccaaaccatttgtcatttcctcttgctgcactacccctcatgggattcctcttccatggtctttgtctccagaagctgaggatagatggggccacctgagcatgcagtgaacacagagagcacttctgggttgggcagctttaatttctctctaatgataccttctcagttcattctctgggttcttggttatctctctcccctccgcttcttcttttctccagccctgtctttttttttctcttttttttttttttttttttgtagtgggcaggctaggaggcatgattaggattgatggaggaggggaactattccagttcatttattttttccctgtccaaagcccagtttcggcatggagatgtgttggagccagtagtggtgcacagaccaccagctgtgcttgcagtgatccagccaaatatcatcttaaatacagggctgagtctcagaaggcacatggaaggggcccccttttccctattctatcccagactcctgtactccttggaacacagggagaagggctcttaactaaagtacaaagggcatggtgcccagctctgcttttcaaagaaactatgttcctctcagaatacacctcacagaatcacgttactgtcagtggaggaaaaaaccaaaacctacaacagttcaacagtcaatgcaaagggcttcagaaaccttcattaatttggttatttggctgaatgctcaggccctttgcttttctccttagtgctgcctctttttgagtgtttctttgcctctttttgagagagaggggaacattcagctttgatttttgtttgcagcttggtgacaaatgatggggggaaatttaaaccattcatctactgagttctgggaattgtcagaggattttatttgtacagtgattttctgacctccattttctcagagaagtaaaaatcatgctgcatttgtaaacaaggtacttttattaagttgaacttttacaaacatatggtatatttagccaaaataacactgttatttaaggcaagtacatccaaagggctagcatgtagaattatgtttgattaatgtgcactcaaaagctgttacacagtaagcataatttcagtttgtggagtgtcttaaatttactttgtaatttaatgtgaagccacataagtcagagttgaaagacatttgtctttgcattttaataatagaaatccatagcatgttacatggactttcaagtaaagcaatcactattctaaacttgaaagtttctttttttaaaaaatataaattgcaatgccttggagcacaaaaagaaataggaaaattcaaccattaagcatttgaaatgggctaatttgaagtgcttgaagcgtgttttgccatgctgagtaaatttttcccttcctagtaactgaaaaagtataaaacactaagtatctgtacttagctcactagtaaagaaaatttaacccatgaatagtagtactgctattatagaggtagtttgtaaaagtttatgaacatgcaaaccaccaggatttttttttctgttctactattttctgttgccttatttagtttcttgcaaagttgctcaaatgccatctctctcactcacaccttgaattctcaatttaaaatttttcatgcatggtatttatcatatatatgtatatatacatagatgtgtgtgtgtgtgtgtgtgtgtgtgcacgtgtgtatttcttggttagaagctctttttgagcaaaaagtcctggaatttcaaaactgcataaacgtatggcatacatacatattaataattgatttgtgtaagttttgactcttattatgtgggaagtattgcagggtaatgccattgttctgctttactggctattcatttttgctaagccataataatatatgttgactagatattattatactattttcaatgttcttaattgtcaaccacagaatcaactctagctagtttaagtagaaaataatttattaagagggataaatcactctgagaatcattgggagggcaaacttgcagaactaggctgagtttccaggaatggctcacaaaacagaatttcctgggactgccaaggagctgttgtctccaccaatctggaggctgcataatcaggaagccactgttccactgtagcctctggatccagagccccatcacctctgctgtgattcaggccaacaaaacaggtgccacacactctgccggtctctcatttgactcattttttgaaacaaagtctggcatgactacatctgattggcagaaagtatatctcatctggaactctggctgtaagagcaagattgggaagggtgagaggattttgaattgcactcaaacattacagggcattggaagaagtgttgagatagcccatcttcagaatccactccagttaagagccttgacttgtctaatctattaagattctgtgccattcagttgcttgaaaattgttggaggagtgtgcagaatacagaatcttcctataaggtgatcagtcagcagcctggctttttcattgaactcatggtgtacagggcatttcccctgaatctatgagtccccagagaagaagagttcactatctttcctggtagggacagggaagcccatctggctgctggcgttctggggcagggcaagaaatgggctgaaggacaacattttagtatgtagactttcactaaactctctggttttgaccccaccccttgctgttcaccctgcctggtatctctcagcctgaaacttctttggtataatttctctaggaaaaaagcctcttgtctcctgctgaaggtaagaatgagttgccgtgagtagaaaaggtagtcctgtgccaacaattgtcttgtgtacttctggtttttttgaaacaggatctcactctgtcatctaggctggagttcagtggcatgatctcagctcactgcaacctctgcctcctgggctcaagtgatcctcccacctcagcctcctgagtatctggaatcataggcgccaccacatgtggctagttttttaaaaaaaattttggagagacatggtctcactatcttgcccaggctggtctgaaactcttgggctcaagcgatcctcctgccttggctccccaaacaactgggattacaggcatgagctcctgtacctggcctgttttgtatgcttctatacatggacttctgtctgatcccgctgccacaacctcactaccatacccacgcatgtgggtaccaggtgtctccaaggacaagaagccaaatgaggtggtttctcctccattctttccccctgtaggtatttggagaataacccttttctttatgctaggtcaacaaatcctcctttgtctcttctctcttagaaagcttttgaaaatattttgttcactatttttcctctcccatttctttgttattgtggattaatatctttttaaattattttactattataatatcatagtaggtttgggagaaggagaagagatacatatatatgatcgatctgccatctttagtcataagtcctttaaatttattctttagtgtgtttatcattattacattaccaatctcatatgtacaaatatgtaggactatttctctaaatttaagaatatagagattaaatataaatatatgagaacaaaatccttaatgttctcactttcaaattataaagtactttttttagtgggaggaaaggggaatgtgcatttcaaggatattagctgtatctgagaatacagggcaatatatgctaagtgaggaaaaaaatacatggccgaagaatgtcatgagaatggaaaagggagccctcccatgggcttgtaaggccagaaagccttcctggaggaggtggaaattgagctggactctgaagaggaggtaggaaccaggaagagagcaggatctccagctggggtaatgtcaagtgtgactggttatctttctcctgccaagtggagatatcctagtgtgtagctccctttcaggatctgagtaggtacgagggtgcagccatgaagccagtggtctaaagaccgtggagttttcttgagactactagaacagtccatcaaacacagggagtttatacagtgctcaagagaaaaaggttaaaaagtgctgttgatgagcaacctgctggttcacagatgctctttactattcaaaatataattctgattaaagcaaggaattaaaatccaaataaaaagatgcatagtttatactttgagtttcatacttgtacatctctatagttataacttctttttttttattattatactttaagttttagggtacatgtgcacattgtgcaggttagttacatatgtatacatgtgccatgctggtgcgctgcacccactaactcgtcatctagcattaggtatatctcccaatgctatcccttccccctcccctcaccccacaacagtccccagagtgtgatattccccttcctgtgtccgtgtgatctcattgttcaattcccacctatgagtgagaatatgcggtgtttggttttttgttcttgtgatagtttactgagaatgatgatttccaatttcatccatgtccctacaaaggacatgaactcatcattttttatggctgcatagtattccatggtgtatatgtgccacattttcttaatccagtctatcgttgttggacatttgggttggttccaagtctttgctatcgtgaataatgccgcaataaacatacgtgtgcatgtgacaaaattgacaaatgggatctaattaaactaaagagcttctgcacagcaaaagaaactagcatcagagtgaacaggcaacctacaaaatgggagaaaattttcgcaacctactcatctgacaaagggctaatatccagaatctacaatgaactcaaacaaatttacaagaaaaaaacaaacaaccccatcaaaaagtgggcaaaggacatgaacagacacttctcaaaagaagacatttatgcagccaaaaaacacatgaaaaaatgttcatcatcactggccatcagagaaatgcaaatcaaaaccacaacgagataccatctcacaccagttagaatggcaatcattaaaaagtcaggaaacaacaggtgctggagaggatgtggagaaataggaacacttttacactgttggtgggactgtaaactagttcagccattgtggaagtcagtgtggcgattcctcagggatctagaactggaaataccatttgacccaaccatcccattactgggtatatacccaaaggactataaatcatgctgctataaagttataacttcttaaaagcaataaacaccagattttagttttcaacagcatgtggaaatattattctggtattctcaatatttgcatagcctctcattattctttgatactttgattattgtatgagtcagtcatcatctctgagtccttgaactaggcaaagcactataccagcccaggagggggctgttcatatgttcattcagcaagtgtttgctgaatgtctatgatgcaaccaaaactaataaggaaataatttatttcctcaaagagttgatggtttggtagcaaagtcagcacacaactacagagtaacaggggagcaagacacatagaatgattaacaacgataataaataaaggtaataatagtaatggagttgcttgtttctttaggggtttatcttgtagttggaaaggcagagcatagacacacttaggtgaaacatatagactcttagaaagtaagacaaaagcacaaagtgacagtgtaaaccaagcacagggtatccgaccagggtgcgaggaaccaagcacaagggatcagatgggaatgtgaggaatcctggcaatggtggaggaggcccttgccatgctggccatggtgggagcttctgatggctctagagcaccacaggcttgactgagatttggtggacacatcaaagtgcctggttgggtagacatggtatcacaggagtagtttgaatgaaaggttcagtgaactgcactcacatttctgggagacgtgtttgctcagttagaagtcacagggagctagatagagctgctccatgtagagcacctgaagacagagggcagaccataaggttccagccagacggaggtcagggcagagtcctgccactgtgggaacacttggaggataaggctgccaggtggaccggctagggaacaaggatctggaaatttaggcctgtgttctagtcatccacaggtgtattagtccattctcacactgctataaagaactacctgagactggataatttaagaagaaaaaaggtttaattgactcacagttctgcaggctgaacaggaagcatgactgggaggcctcaagatatttacagtcacggctaaaggtgaagagggagcaagcacctctttcacatggtggcaggagagagaaagaattaaggggaaagtgccacatatacttttaaaccatctgatctcatgagaattcactcattaccacaagaacagcaagggggaaatccacccccatgatccgatcacttctcaccaggtccttcctccaacattgggaattacaactagagatgagatttgcatggggagacagagccaaaccctatcaacgggcattccaggggtgtcttagaggcaataccagggtgagaagatgagtttaatggacaggtttcctcatagccccacttgctgcaatcagaggagctccactttttaatctatttaatatataggacttgtcagaatttttttttaatcaacggattctactgattaaaaaaataagtctgcaattgtgatgggaaaagacaagaaggctggaaaatgagacctataatacttttagaaaaaaatgtaaattaagtctgagctagataatctcttttgaggcaaagagaagcagagtggcaaataggcaaaggtatttctagtggaagagatagtttagtcaaagatgagaagatacaattagaaacgttctgtgtggaaaatgaaaatgcatggactttcctgggaagcaggaatcccatggctggtgcagtgggtacagtgaagagtttgaatttactctggcgggcaatccagtgtctcagaaaatgaggtgtgggtgaggagcatgatgaatatgtatggttacataactctgtgtcagttactcagagcatgaagggcttggattaatatatggagccatcacatttttcttggctttggtccctacccataaacccaggataatgtctccagtttccctgcttgcaaacattctggccacaatgcatcaaagaaaaaaatgagactttgttaggaaaaatattgatcaacattattatctcttgagcaacaagcaaattataataattgaatactccatggtatctcatgagttttcagtattctgcaaaaacatttatcgtccctgggtgaggaatctttttaacttggacatatctatgcactactgtcctgtctttggactgagttcttggtggcatagtcattctgttactcctctgttggctggcacagtggtacttcgcgtgtggtctacgcacgtttttggtgcggatgtgtcagagaaatgttccattcattgccaggagagtagtgtagcactgagagaggacaaataaatatcagtttctcaataggagaaaaagacaacaattaggagtataaaatatggcaaatacaataatagagaacacacatggaatgttatatgagtataagaagggggtggtaaaaactaggaatctttgttctagtgaagcataagtactctctgcaacatagaatattctgttagtctgtcatagaacctgtttgtaatttgattatttgatagcttgagaaagattgtcatgtttcagaatgttagagcaagcaagtgaagaatttaacaaatatcacatatttaaaaaattaatttggtgccattagtgcatatttaaaaaacatatttggtgccattagcggctttttcgtatgttaatatttctctttattactctattattatttcttatttatttatttatttatttatttatttatttatttgtttattttgagacagtttcgctcttgtcacccaggctggagtgcaatggcgtgatctcggctcactgcaacttctgcctcctgggttcaagtgattctcctgcctcagcctcccaagtagctgggattacaggcatccaccaccacacccagctaatttttgtatttttagtagaaacagggtttcaccatgttggccaggtggtctcaaactcctgacctcaggtgatccacccacctcagcctcccaaagtgctaggattacaggtgtgagccaccatacctggcctttattcttattcttattctaatataatctcttttaagttctaccatttttgaaaacttttcatcagttcatatctcctaggagcagaatctatgcttttttttgtatgcttttgaagtatattggattaccacagtacatttatgtgttaaaggtttgtatgaatcaaatcagagatattggtttaggttagtaaaacttcatctaacaaactgtatgatgctaagcaaaatactgtaagttaatttaaaatcaatctttgaagcattaaaactaagtgtttttattcacctctggttaatttttacacaatggtctaggtaggcccagcatgttggggttttatttattatggatcatcagcagtcaatgtttattaagcaatgtctgtatatacaccaatgtaataactgttacatgtaaacacaaaagaatgatgacataatctttaccctcaaggaacttccaatctgtgcttgaagaggcaagctaaacataaataaagattgccatgctagatcgcctatgacaaaaattgtggaaaatttgagagttatagaagaaaaaggtctatgatgtgctataatcaggaggtggccttgaaataaatttcaaggccacaagaacctgccttctttcagagaaggcgttcctggcaaatagaagacaacacaaaggcagagatagaaataaacatggcaatcagtctagactttgtaaagatttagtagtcaaaagcagtgtctgtcagttaagcatttcatatagttttcttcatagaatttttacttgattatcatatatatgtgactatcaaacatcttaatcaacacctggctttggttgtcagacattttcaaatcaattcaataatatttataatatacactgtaagaatttttatgcctagcatcatgctaggcattatatagaaacaaggaaggactcatagtcttacctttgaagatgttgttgctttaatagaagaaaaggtatgaacaaatacaataattaaagctgtcatcaaaccaaggctactcaaataattcaagttatgaaactccctatgtataaattgccacgtgaataaagtcctcccagtcctttgcatatgcaggtcctttgcatatgcaggagctattcccccacacacctgatcctctgctcatacccattgtatctccttctagtgcctaagttatattgatggtgctctgccagctagagaccatcactgcgcacttgccaagcccatacctatctctcattgactctctggtttcctttcaaggtcagcgagcacatactgtagtcatcccataattcccaccttctaccaccttggttcctctgccttttactactcattgttcagttacttccacctcagacccctttcacacaaagatgcaccctttttggacctgatctgtttcttccgtttcttctaactcttgccaagtgaattcagggaaagaacactacactgatgctctcatgttccctctctctttgaacaaaaatatctctatcatcctggatgcctcccatagaaatattgctggcgaccctcctgtattgaggaaagatactatatttaaatatgaagaaaagaatggtgttgaatcagtgacctcagcctctgaagcctttgaaagtatgcagaagttcttttatgaatctctattaaaaaaatctttctctagaagtttaccagtgcttccttcaaaatgtctactcaagataaaatgtttaaaatatcaaatttcatttcttatttattacaaaaaaatgctgtaaatttttgtttttctccataacatagaatattatctgttagtctgtcatgaaacttgtttctaatctgattatttattagcttgagaaagaatgttatctttcagaatgttagagcaagccagggaataattataacaaatatcacatattttaaaaataaattaaaacaacttaaacaactatattgtgtaagcttatataaactgcttaaacaatatataagctacttaaacaagagagttgactgaacattctaaattccaaatgagcaacgttcacataaattttcaaatgtaatgcacttataaattgaagctgtctcgtatagtttgaaatgaatagaataaataatacctattatattaatataagggagagagatgggaggtgacagaaacagacaaatggttacaagtttgagaaaatcttttgcacagaaagtagaacttgaactgaactctgaatactaaacattgctatgttagggaactattgaaggaatatctcaagttgggaaaagatgtatttggaaaagatgtatttggttgaaacagaaacttcttatggaggagaaaagaagacattggccaatcaggattgagccaatttgtaagtgtttttaaacctcttcacattaaagaggttagtggattttcttccataaacaatggaaagctattgaaagttctgaaggattgcaatgaatttgacaaaatcgttttcaaaaatcatcttctctggtgatgttagagaaattggaaggcaagagactagataggagaccatttgtgaccacatgcttgtgagatgccagggacctggaataatgttgtgggaatgtcaaaggaggggaactaggacaaactcttcaaacacgatgtgacaaagtcttgaagtaataaaggaggcaagaaaagacgatgggtcagaaatgatagtgaggtttcagatggggtgacagggagaatgaaggataaacctgatagcagaaacagggaggtcagaaggaaaaactgtttggatggatgagaggaaggaaagagttaagtacatggggtatttagtgctatcagtagaaatttaatggaactacatatgtcatttaaaattgtctgacagccaacttcaaaacagtaagaaaaaacaggtgaaattatgtttaataatgctttgtttacccccaatatattcaaaatgttatttcaacatataatcaattaaaaagtattaccaatatagtttacattctcgttttaagtttttgagatctggggtctatcttgcatttctagctaatcccagttgagctacatttcaagtgctcagtaactgcctgtggctagtggctaccatattgggcagcacattattaggcagtcatagaactgacaaaaaagatttagcacacttcttgattaagatgatgctaagactgtattttggaaattataattctgtatattatttctccttctctatttcttttgtttattttagctattttagattcatgatgttcttttagcagaacatcattctttccccaaagcaccaagactttttagaaatatccatgatatacttttttattgcctagagttgctgctgtctcatttaattctccatttgacttacaactttaataaatacatgtctgaatacattttcttcttcctttgtcagtcttcaaagttttgattatgaaataatttagcaatgtgtcctcaaagcctgggataaatgacatttagtactttggatatgaggaccatttttcatgttccccaggctgcatatgtgtgtgtatttctctcatgtttaatatctggcataaacttgctggagttttggtcttcacgatatgctaaagaatgcagtataaaagagagcctacttctatagaaaacaagccaaggacattgtgttccatctttacaatgaaattcagatttcccattaaaaggcaaatctatcatttcaaaaggttgaataggatggtagtttaaaagaatccagctgcttaaatttagggcactgaaaaacattcaataaaaaaaatgttccctgggtctcaagcattttcatttgattatgtattggatagattttcattaggcctagaattttgcctcttagaattctgtcctaaaatagtttgacaactgttttgagaaagctggactcaactatggtatctcatttacgattaaattatgtatttgctgtttagaatattcttgtgtttgataatatattcttaacttttgttgtagaaatattggactaattttgcagtgctttactttttcatgtttattgttgagcctctctcactcctatttagtttcctttatgtttcttcttttctttggagacattgtcagaacagctattttgttctctaagcgacttccttcaatgttttcagtcacctgttcacacgtgactttatttttgtagccaagtagaatgctacctttttgctattctaatgtgctctgcccaacttttttctgattaatttaggagtaggaagtggaaaggtgggtgatactccctacaatacaacatgttacccacaaactgattagggagcacagaagagctctatgctatgcagctgagctacaaattcttaaggaagtagtctatatgctgtaggaacaaaaggatttatgtcagacatatttgtatgatgcacgtatttcccatgggcattaatagtcgtttattaaaagttatgactaagtctccattctctccagctctggactttagccctgctctctttcacgggtaacaccagagatgtaacctgggaccatacagaggaccatggttaacaagggcagcgcttgttatacccctggtaataggtatttactaggtttcttaaattgagtatttggctctctcctactggttgttaggcatttttacatgtaaataatattgcccgtgggccagtccctaaaagtaaatgtttccaataattttttggcatccaatgttttactaacactaatttggtcgcatttgcagaccttacctcttcaatgttcatattcttcctaaacaattgtttattttgaaagagagtttgttctagtcaatatcagtccacttctaatgaatttttccccaaagagctcaacaattttatggaataattctttttcagaattcatattttattctagacccaaatgagcaagtactttttatgctttatcatagtttatggggggtatttcatactggggtcctgtgcttccactcccctgccaacactggctatcaaaactgcttaggctgcaaataaaacaagaaatgaaatccatctggcatttctcattgaattaggaccagaacatttttgttaaatattaacagatggctaaagtcttaatatcaaactaacatttaaaaacatctaaaaggacccacatgagggggaaaggacggaggaccatgtgttttcttcatctcagagcccttcctgtacaccattccccccgccatttttccaaccacatgttgagaatcactggggcctcctatctctaataacttttattccttaatagctggtatcaaaatggcatgtgatgatattatcaagatagtgtaatcaagtgttagccaactcaggtgatgtgttgccattggcatgcctcaagatcttttattaaagtcaattttctgtctctcctctcctctcctctcctctcctctcctctcctctcctctcctctcctctccctcttttctttctctctcttataataggaaaaagaaaagaagtacatgcttcccttggacaacctgaaagttcgggatgtggaaaagagctttatgtctagcaagcacatctttgcactctttaatacagagcaaaggtaagaaattgaaacagttcctgtcttcagatttttttccttgaagttctacatgattcagagatcatatttgaaaatagttcctttggtcacaccttgaaatttgtctgctcttcagttttcctttcatttattttgtatttttaaattccaccatgggttatggcttcaaaatataaaaactcagactaaaaaagatcttcaagtgttaactaattatttcttgcttttccacctggcatgaaaataattcttcatccattttttttttctttttgagacgggatctcactttgtcatccagaccggaatacagtgctatgattatgattcactgcagcctcgaactcctgggctcaagcaatactcctacctcagccctctagagtagctgggactactgcgtgcatgccactgtgtctggataatgttttaaaaattgttttgtatgcagttgacctcaaactacctgggtgcaagagattctcctgccttggcctcccaaagtgctgggattacaggcatgagccactgcacccagtctgtctgttcttaaagctacattttgttaccttaaagtctttcttgtcccaatatattgtttacatacttacaaactactctatgataatttttaaagtatctgtctaacatgaatggatatcacttaagctcttcttgaagagcggacaaatttcatatactatgactaaattcagggaatagaattattcagttatggcaaataaaaatgtatagtattttacagtttttcaaagtgctctctacattcattgtcattggtttttgtaacaattgcctttgagatcaaaaggatacagttacaaataagaaagcgtaggctcagggatgctaactcactttcttaaggtcataaaactggtgcatgggggagctggaacttgtattaggacttcctctaagtacacttttccttccactcattttccattgtgtgcttattttgttctgctgttcatgtgcagtatcaaaactgtattttgagctgaccatcacagagtgccatgatcttcactgaaacttagcagtaaagttaaataagcaaatggagaggtaagagaggatggactagagaagtataaaaggggtacaactaggaaaggataataaaggagagtttttccaaatgaaaatgttataggaaaaagctaattaaaatttgtgtgagtcagttattaacacagtaagtcattaggtaacagaatctaattttaacccattttttgaggctgccttttatctttatttagcaatgaatgaagttacttgattaggttcaatgactggcccagggtcaatcacacagtaaattaaaatagcaaaagaagacgtcttcctacattcccagtcagttgctcagagtgactcataatacaaaaatacttagtaaaaccacaaagcaagccatttaaagaatcgacaggaaagaaaattaagtacaactaactcccctaccaaatattcaaatgggatttttgaagacagtattatttgagagcagcttatgaaaacacactgaaaataataaagaataaaaaggttttctagagagaatagtagtgagtctgccacactgcagccaagctcagtactagtttacatgccttcatcagagcagcagagactcaggagattctaaagcaatcatcagaggtgtgctcagccttcttgcctagatgcagagtggaacaggtgactgccaaacaggaagtcaaacaaaattgaatccatggtcaacctgaaaagttcaggttataaaaaagctgggtgtaaggtaaaaacaaggctatggtagactatcatttttcataaaatacaactgtggattttaaagacagcaaaagtcaccgaaataaggaaactgtggactttgaaaaatctagatattttgggatcttggagttctaaaaaggtattgaattctgctgccacttctcagtgacctcagtgagtatatagatgtacccacattggccattgtcttctcctttgaaatgctgattcctttaaatcatttttgtgctggcaaggacctccagtgcaatgttgaccacaagctggaatccttgtcttatttctcattttaaggctaatttaaggatgattttaaaaattgtatagtgaaataccttttgatagatgtctgatatcaggtgaagatttcttgtgtttctagttactaaggtttctgttttcatttttaaatcatgcttaggagttgaattttatcaacctctccacctggaagattgtatgattcttcttctttaatctgttcatgtggtgaaatatactaatagaccttctgatgttaaaccatcctttgtctcctgggattaaatttagttaggtcacaatgtgctattctttattatgagttcttggtttaagtttgctagtattttagcaaatgctaaaatgagttagattggcccataaatttcctttttatattatttctgcctggttttaatatcaaggttctgttagcttcataaattgaggtgagaataagtccttattgttctttggaacccttcataaaaggtagggattaactattagctgactgtttggtggaagtaacctgtaaaatcatctggccctaggaagtatttttggtaagtaggcttttaactagtgattgaatatatttaatgatttcagatttatttaggttttctgtttgttccatggatccatttgaataattgtattttttctagaacattgtccattctgttttgctttaaatatattgcaccaactatttcttaatattttatttttctaagtctctgttgtatctgaaatttgactgatttttatttctaatattaatccttatctttttttatgatcactcttgctagagttttgtgtcttttcagagaaccagtttgtggcacttttgaacatctattgtgtatattttttctattccaataatttctgttctcttaattatttccttccttgtattttcttgtgtttacattttaggtcttttcaaacttcttaatttagatgtgtagctcattaatttttatcctttccttttcttatatatctgcatataaatctatagatttctcgccaggtagtgtttagctgcttactacaatttttgaaatttaacaattttattaccattcagttctgtttcctattcttcatcatgtttttttttttttgagctatttaaaagtgtgttttacattttagaatgcagggaatcttattgttttgtatcattgatttctaacttaattgtattgtgaccaaataatatggtctagtacatgatgttaataaatatttcacatatacgtgagaagaatgtacatttactagcttggaagtgtaggttccatgagagctgattggattatgcttgttaattgtattttgcaatgtctatagtcattatcttttcttcatctcaaataattccaacattcagcaagtatatattaggcagctgttatgtgccagatactgttctatgcttaaaatacacctgtgaatcaaatagacaaagacaattaaacattttagatactatctagaaaggggaacaggcggggagacaaataaaaactcacaaagaatcttattttatcacatgagcattaaaaaggtcgctttgtgattgtgagcttgaataagcctgccaatttttgcttgaggccaatctatgttattagattcatacaaatttagtattgtattttcctggtgacttaaaaaataattttgtgacagccctcttcattcctaataatgcactttgccttaaaatttattttgtcttatgttagtatagctacactaactttttggttaatattttttattgatacataatatttatacgtatttatggagtacatgtgatattctattacacgcatagcatatgtaattatcaaatcagagtatttaggatattcatcatcacaagtgtatatcatttatgtgttgagaacattccaagtcctcacttctagctattttgaaatatacaatatattgttgctaactatagtcaccatactctagtattgaacattagaatttattccttctatctaactgtatgtttgtacccattagccaacctttcttcatcctctctccccaacccccaccaacacacacacacacacacacacacacacagacaaacagacacacacacaaacacacacacacaaacattatttccaccgtctggtatatatcattctactaactacctccgtgagataaactttttaaactcctatttatgagcaagtacatgcaatatttgtcttcctgtgtttggcttacttgacttaacatagtgatttccagttctatccatgttgctgcaaatgacatgattttattctttttttatggcagatagtattccactgtgtaaatataccaccttttctttatctattcatccatttagaacatttaggttgattccatatctttgctattgtaaatagtactacaataaacatgggagcgcgtgtgtctctttgatatactgatttccttttctttgactgaatacccagtaacgaagtagttctagttttagtatttttagaaattgccatactgttttccataatagctgtgctgatttacattcccaccaagagtgtatgttcccttttctccacatcctcaccgccatcaacagattaaatctcattactcattattggttggttcaggttttttatttctttctgattcaatcttcgtaggttgtattgtccaggaatgtatccatttcttctaggttttctagtttgttagtgcatagtttttcataataagctctgatgttttgtatttctgtattagttgtaatatcttttttatttctgattttgtttaagtcttctgtcttcctgattagtcttacgattgtcttattgattttatttatctttttaaaaatgcaacttttcatttggtgatcttttgtattgtctttttcatctccatttcatttagttccactcttatctttattatttatttccttctattaattctgggttttgtttgttcttacatctctagttccttgagatccatcattgtattgtttatttaaaatctttctatttcttttgatgtaggcaattattgctataaacctttatcagcactgttttcactttatttcataggttttggtacattgtgttttgatttctgtttttttcaagaaatttttaaattttctccttaatttttctcttgactcaattgtgattcaggagcatatttttcactttccatgtatttgtactgtttccaaaatatctcttgttattgatttctgtttttattctattgttgtctgaaaagatacttgatatgattttgatttttaaaaattttttgagatttgttttgtgtcctactatatggtctaccctagacatgttctgtgtgctgattaagaataatgtttattctttagctgttggatgaaatgttttgtaaatgtctgttaggtctatttggtctaatatgcagtttaaatccaatgtttcttcgttaattttcagtctagatgatctgtcttatgcttagagtggagtgtagaagtcccaactattcctgtattagagtctttcccttcaggtctaataatatttgctttatatatctgggtgctctggtgttgggagcacacatgaggatacaatcattacaatcattatatcctcttgatgaactgacacctctttcattatataataattttgtcactttttattacttaaagtctgttttatctgttgtaagtatagctactcctactcacttttgagcaccatttacatggaacatctttttccattcctttattttcagtttatatatgtctttataggtgagaatttcttgtaagcagcatatagttagatcattttcaaaaattcattcagccagtctatattttttaagtgcaaagtttaatctgtttaccttcaaggttattactgacatgtgagggcttcttatcattttattacttgattccttattgttttttatatccttttttcctttctttttctctcataatttatctttgtggtttgttggcattctgtagtggttacatttaagaattttcccttccttgtttctgtgtttgctccactagtggtttttatatttgcatgtgttttcataatggtagttattattcttttgcttttgggtgtaggtctcccttaagtatttcttataggggtggtctagtggtgctgtatctcttagcttttgctcatctgtgaaagacattatatctctttcatttaggaaggataattttgctgggcataatatttttggctagcacattttttcttttggcactgtgaagatatcatcccattctctcctgtcttgttagggttctgctgagaaatctgctgttagtctgatggggttcctttatataggtggctagatacttttctcttgctgtttttaattttttttctctttgtctttgatttttgagtttggctataatatgccatgaagaagaccttttcaaattgtatttatttggggatctttgactatataggaatgtctaaatattttgctaagttttgaagtttttaacctattattttattaaataggttttctaattctttcattttttttcgttgtttcttgggacaccaaaatttgaatatttggatgctttatgatgtcccatatgtcttgaaggttttaatctttttgttgttgttgtttttatttttgtgtgactgggttatttcaaaagatctgtattcaagttctgagattctttctcctgcttgttctgtcttactgttgaaggttttgaatgtattttgtatattattcaatgaattcgtcagttccaaaatttctgctttttaaaaaattatatctctttgataaatttctcattcatatcctgaattgtttttctgatttctttgtattgtttttcagaatcttctttttttcacccattttaaatatatactttaatgagttttacagatatgtacagttgttcagccattaacacaagatatgcaacatttccatgatgccccttcttgtgtctctctgagcttctttagtgatagtatttttaatttttccctaggatttaatgaatttcccctccctccctttcttccttcctctccttccttccttccttcttttgagacagggcttcactctgtcacccatgctggcgtgcagtgatttgatcatagcagcctctaccactgggcttaagtgattctcccaactcagcctcctgtgtagttaggactataggcacatgccactatgtctgactagtaaatttctttttattgggatctgttgctggataattattgtgttcctttcaaggtgtcaaatattcttgctttttcatctttcctgtgttcttatgttgatatctacacatctggtataactgttgcttcttctaatttgtttgaaattgcttttgaaaaggagaactcttttctgacatgtatctatggtattggttgggtagggtactttgcttttgaatctgactatgcgtagtggtgtagtctctgtatgacttcttcatttgtagacagcatcagtggtgtctgagactaccttggtggcttagaatgcagttgttattagtagaggctatgaaaaagttttgctgagtactataacactaggtgggctagtctttaggccccaggccagtgtgcactggtgctggtgttggtgggtccaggaaggccaattcttgtgcctccaggttgctttctcagatgctgctaatggcatcagtgggtctggcaagtgaacaggttcttaagcccctgggcagtggatgtggcatgggcaatggcagtagcaatggtggaacatccatctgggacccaagtggtccacccctgtggtagcagtggctgcaagaggttgggtgggctggcccacagactttcaggtggtgtgtatggttgggtgccagctgtggtggtagtgcaagttgaatatggctggtctcagaccctgggagaagtgcttaggtgccacaggtggtcaactggcctggatgatcttcaggcccctggaaagtacatgcaggtgatgctcaggcccctggaaggtgtgtataagtgatgcccgtgtccctggatggtatgctcaggtaaagggggaaggagtggagctgagccaggtggacttgctctcagacccctcagtggtactggctatggtaggcagaagtagggtgatccccagaccactggaaaaatgcttaggtgagagcagaaatggctatctgtagcccttctactgggaagcctatggttgctttccctgggtggagccataagctgggggctgggaacatgggcttcatttgtgtcttggctccgcagcagcttaaagcagtggtggttgtgggcagtggcatttgtccttgggggcatatgaaaaggtgtagttacccctctgcagagggccacaggtaggtatgatgggcatgggatcactgtctgtggctcctgccttagccctggcaatggagtagaatgcagcttggtggggtgggggctgtgctctcaaaatggcgtatgcagcagtgccttcatgtggtctccagacagctctctatgttagtctcagaacttgtaaggattgaggtgttctctcatggctaggactgtaggaatctccagcagaaacatggtctactgggggtctctcattcacactttccccacattaaggagccactccagaccctcagctgatccagctgaactgtttccctctcctttcttgcttttggtgcttcctgtcacttctctgttgaattccagtgttctctcttagattatctactcaaagtatgattatccactcattattttggttcttttccatggaagaggcaaataccagattgatctaggcagccatcttgaagccccctctttgtatttgaacaggccatgatatacttgcgtgtcatttttctttgctagtggatagactttttttagtctgtcttttctctgaggatgtgacctttggaggttcctggattcacccaagatcttattattattatattttgtggacattaaaatcaaaaccttttggttactgaaactgatgccatccagtggcaaaagttagaaaagatgtatttcctcttttgcggggaggaggcaattgataattcttttattttggagctttggcatgtaaaataatgtttttcatatgtcttataggaaatagtttttattctcttcctgcagttttggctgaaatgaagtggcctttcattatcaatagattgtagaaacaaaaaactatgttcctgatttcttctaggggtgaggactgtgataatagtgaacttagaaggtcaacctttgattcagtgtgtatacacacatgaaagttttacaaactgattagagagaaatagcaataatttattctctcaacaagtatttattctgttatccattccaaagtatcaaagtaacaaagtatctgttatccattccaaagtatccgttccaaagtatcaattggaatgaaattccaatttattctgttatgcattccaaagtatcaatgaaatgtattatctatcctgaatgtcagtattggtactgtgtattattctgttctcatgctgctaataaagacatatctgagactggataatttataaagaaaaagagatttcatggactcatagttccacatggctggggaggcctcacaatcatggcagaaggcaaaagacacatcttacatggtggcaggcaagagagtatgtgcaggggaacttccctttataaaatcatcagatcttgtgagacttattcactatcatgagaacagcatgggaaaaatcagcctccatgattaaattacctcccactaggtccctcccatgacatgtgggatttatgggagctacaattcaagatgagatttgggtggggacacagccaaaccatatcatactccaattaaaatataagatgttttcttgttttgagaacatttgcaatcactagtgtgagtgtcatacatttatttttcattgaacttaaaacagaaggactatgttagaaaagaagaaaatgaagtttagttgtgagattattatacatgaaattaatgagttatagtgtgtaaggtaacatctaactagattacaggatagggtattccactgcagttctgaagtgtcagaatagcagacagcatagtatttagccacagcaaaagagttagcatcatagaaggtgactttcattaggtcatggcatgaattgatgtagaggacatagaaaagactacttcaaatgggaaatagtattagtcaaagccaatagcaagaaatgttatttaatctgttgctagtctcttctgatgagaagaagctaatttcaaaggcaagatgagccctagtgacaaaaataaaaacattcctttttgtttccatagaatttattgaactggacttacccatgtcagtttatgtattttaatcctctgtgttgtggtaaaatcatgcatctttcaaaagcccatatgcttagcatgattctatcaactattcttaaattacattcttttcaccacttatattgattctgaggttatgttcctaatttgttttctcttctgagacaagaccttataagaaaataagtgttctcattccttgcctttagatgaggttacgcttgattaatttagaatagattttctaaatgcctccattactttgtaatttttatccctgtcctccacatcagtgttttggatcaatttgtttatccattcagcagacctatatgagatgcattgacttggagctaagagtttctgtttgaacaccaatgcaagtttaaaatatcatggctttccgggggtttccagaaccttatagataatctcgtcggtctttcttacctcacaggttaaggagctatatctataacagttaaatgccttcctaatgtcacaaaaacagttaatgagagaaccagaactacaacccaggtctaatatctcctaactcaaggctgtttctgatactgtagtttagagattaactatggaataggaattctgcctaagactttaactggaattgctcctaaaagatcagcaatgaagagatttttaacttattgtgtagggatttcagtttactgtaagatcatacaaatttccatggaatgcttttagtctcattttttaaagccctgcatggaactgaccattgctcctgctacagttcctgacaaacttttagtcatggctatttgtatggcaacattattcctaagagctcattcagttgctatttcagctttccactatataaactttaaaagagttactctgtagtcccccatcatcaggtgtgtgggaattaatacatttaacatcctttaaaaaaaaaaaggcttcggtgtcctggtgaattaatataatctttacaagccaggtgaccagatttttgagccattttaaacagtgtttcagtgctaagatttataaatgaaaggatttgttgctagttgcagtgacttcagcacttgaggagagcgaatttcacactcagactggtttagcctacataaactcccggtaagaatacccattcctgagccttcctctggctcttttaaagatggcatcatagatatctggggagactaacattgtgatactctgttctcacattaattgcttcacctaattataaactgaaagttaaattttagttaacagactcctaaagttcactgtggcatggtctaaactaaggattcaaatgctcctccaggtttttgttctatttgattttgttagaaatgccatgttttctctgatagaagtatgtctagataatggcctcactgtgcttctctcggctctccccaggcaggcgttcagttttaaggtcatgctaaggcccatttggttcaaggtatgtcagctttggtagccaacagagaactgtttctgtccagggggttgtagggcagccacatggtattttctgagcactccttggggttgtagagccttgttttcttttaaaataaggcattctttctactttgtagcttcaattcaggatatggtttatcaatattaccaagtgttccaattcacctcctcccccttttcctatagaaagtgattttaggatgtttcactactccacttagttcccagcatattgctgacactcaataaatgtcaaataatgccgcaatatagttagtgtgtgctctttaggcattctgaaagaatgactctttatttgcattgttgagtagtggtatatttttccacttgttagctggaaagaaattagagtcaggttgttcatttatatacctctatggctacatttctatactaagacatgctcagagtttaaatttgtttgaaaaagtgtttaaatgaatattctgggtggtatacaatgctttgtctaaaagatcatgtctcaattggatatggttgagtgtcggatctacattaaaaaaggaacaattactcttccataaatagggatggcagagactcatatgtatcagaatttcagtaaggtaaaaagcatgtaatattctggactcgggaatgaaatactgtgtaaggaacacaattcaattaagcttgtttatgcaacataaacaagacaccaggataaattattttatttcatttttatcccacttttgtcaaaacaatgtttaagacattacttcttgcctcacaaaatgctaagtgagaattgcttgtcttctaaataccctgattcaggaaggtttttatttgtcagatgattcagtcagtaatcagtcccaacccaagtagagaaatgaaatgtatgttatcctatccacccacaccccccttggagtgtaggtgggtcatctttccagtagaggtgtgtgtaataccctctatgagtatctggtggagggaaaaaataaatcagtttgagagtagaaacactttatcattctcaattgacctagagttcattgtactgtttctgtaactttacgtgtgatataaaaatttggttttccccatgctttatccttagtcagaaaaaaaatcccactagatatgagaccaattgacacctgatatattgttgtccagaggcaaacacaagtgaactggtggcactcaggcatgagtagtgttactagggggatcacctgaacaatgagtttaagaaatggagtgtgttaagtgaacattttaataccttattcttccttctggttttaacacaatgataagttaaataattaaaatgtaacaattctataacttctctactgtgagactgctttccatgagggagaggctgtttttcttattcattgctgtatccccagggcctaacacagtgcctggcatttttgtgagctcaatagcatgagggaatgaatgcatggatgcaaaactttccccctctgttatatggagaagatagaaataatgccaattgctaatataaggcattcttaaagtaagtaagctctagaagcctagaacttcaaatgcaagtgggatgaaaatggaaatacagattcagactctcagaggaaatagtttgaggacaaaaggaaatatttcatttagaaagtaataacctcggtaatatacagactgtataaatgagtgctgtttgaactaaatagaattctatgacattgtcctttaagaaaaaaaaaagcatagatgttttattgtaaattgtcttaacatcattctcataatcttaacgtttattattcaaaaatgctttgtagatagctacactaagcattctaaatctttatttcttggttctagcaaagtattgacaaatttcaggttttcttttttttttatttttagagatggagtctcactctgtcacccaggctggagtgcagtggcaagatctctgctcactgcaagctccgcctcccgggttcacaccattctcctgcctcagcctcccaagtagctgggactacaggcacccgccaccaagcccagctaattttttgtatttttagtagagacggggtttcaccacgttagccaggatggtctcgatctcctgacctcgtgattcacccaccttggtctcccaaagtgctgggattacaggtatgagccacggcacctggccaggttttctattagttttaaaagttaagcaggaggagagccagaagacaatttcaattctctgttcataagttttcacttcttttttctgctagaactattaagttcacagggctcagacagagacttgaggactcttacagttattgattgtgactgcacaagatgagggtaatgtttatttgtcattataaatctggaaagataaaccctgtgctttccctgttaaggggctggataggaatacgtgttcagcaagtcagtaaaaaaaaaaaaaaaaaattgtatattttgaaagttgattccaagtccaaatcttggaaacagagatctctgtttttgcgtttgttcttttcctttgttctagtccctcattgcaaagatatttgttgtcatatggttctgatcctgcttgttacaagtttcccaattctcaatactgcatctttttcctttaagagtgtccctctagttgtgaaatagcatcattaggaaatcctaggtacaccagagaggagggggaaaatatttttaaagggagcctggagagggatggattggagaaccaaaattctcggcccatttggtttatttgattcaccaaccacacccagacagaaatcaaatataatttggtaatatttttatgaactaagtctgtgacaattgaattcacagctaagatatattctcatgaaagacaacataatttcttgagtatgaaatgcctgtgacttaaagcaagcaatttaaattctttattgtttttcaaatgaaactctgaaatgaaataggagtatgacgtcctacttggatgattgtttctgccttttttgagggagaaaaatagcaagttagtgcttttcaacgtttttaaatgtcattaaaagattttggaggaattcttcatgcttaaaacacctgtgtgaagtctagattcatttttctaggggaatcaggcatcgtacttttcaggagcctttgcgtatttcaaacaaatagattgataggatagaatcagcaacttcagttgctttcttcccaaggattcagtttctctcttcccaaggatttaaactggagttgtaaccgaagccattagtagtgccagcaaggattttggtcaaagtgtttgaggcattcatgttcaggtttctgtccaaagactgtgttgatgaatgagcccaacacggctatgtaaagttcaagaacaaaaagaaattatgtccttcacagcaagtttacttttcttctaggatttcagagcaaacacattgccctctctccacctattttccggaacaagtatttgctttccccactaccctcgtcagacaaacactgcagcttgggacagaagtgtgcctccatttggaaaccatagaacaaccccagctgctattcattaatgataggggacccaatcgctagttgtaaacatgctacagaaaaaatatgatcaattctaagagacatgctttaaatgagacactgtagtggtaagctgtaagagaactgatagatcactattctaccttaaaagagattgatacaaatgattgctaggctttgttaaaaaaactagcttttctttttgaaagctattagtcactctgaagaactggattcaagatattatctgtcttgtttcaggcttttatttcaaagaataagtttatattttggttacttatgttaaggatggaattaaagtgagttgtgtgctgcagcttccttttagccagtgtggtggtgattttgtgaatttgtgatagcgtggggcccccaggctgaagccagtagtgagacagcaagtgttcaggtatttcagtcagcaacctagggagcagagctcttcagaaatgaataagcaggattgcgaaaatatccctagctgggcccagcctgaaggaaatgtttaaataccaatatctctttggccgtcttagaggcctcccaagaacaaaaataaaggaaactaagggcatgttttattgactattggaataatcaggtttttagcaataacatgtagaatatagtaagaaaaaaacttacgtcaaatagtagaataaacataaaaagtccaaagaggattattcttcaagtctattgctgtttcaattcagttagagttgaataatggcatctctggcagccataagtgttttctattattagcagtgttaccatatactatcctgacattactaaagtaataacaccttgcctaggagttcttgaatttgaaaaaaaaaaaaaagcctttaagccaaacagcacttgtaactataatgctaaatgaagataattgagctacttcaatcatgcactcaagatattaataataaacctgtcttttaaaaataacaatttacaaataagaatctttgtgtgacttaacattgcatgtctaatatattttcagttttctttagttgacttatggtgacaccaacttacccataaagaatgtctttagtacctatacctgctgaaaaaaaatactgtgaaggtttgaattatattccttacacataaattatattattctgcttcaacttgctgcattcaaagggaaactatttactggcatgtgtaattaattttaattaacacacagcctcagcaaagggaaccgacatggtacaagccttggtagaaaatgttagtcacactctgcagctaactctgagcagatgcatagtttcatgaagaaaatatttgcaacgtctaactgtagcgagtttttctcctttctttctttttctaattttgaaactgcctgtgtttatttcttagaatctgaaaaaaaaaagtactgtgggtataaaggaacagtttcaaaaaatgcagttgcagagagtagttttgactattcaaacaagtaactgcctttgctctcagtgtgtgttaaatccacacctcactgaaatcttttataggtaagagtatgagtgatatgtgttatactaccagatattagcctaaactctttttaatattataaaatgattttgcttcagaaaataaataagttgctctatcatcactgtactaaggaggactccttttcactcttaaaaattgttgaagaccacaaagagcttttgtttatgtggactgtgtgtggattatatcaggaatattgtgagttggttgacttcacattgttgtttgaaactggccatagtgagagtatttataccagaaaactagcaaatgctaaaatcatagcttctcctttttctagaaagtctgttgataagcttttatcagcacaccaccaattatatttattgttagaaattaaaaatgaggttttaaaaatattcatttatttaaaactaaccctaataaacccattttatgttaacataaattatatgttttactttaaaaattattgaaaagagtggcttttttttacagttttgcaaatcttcttaatgtgtagtttaacagaagacagctggatacccatatctgcttctgctttcaatctgttacaatatgttgttttggttgaaatcaatgatgaaaacctggcctcacacagatgtgtagaaaatggaagagtattttaatagccttttaaaattgtggatcttcttctttgatattccaccaaaactcgacaagtaattgtttcttaaaagttaattgcaatgagggatctgaaatcatatcaatgagctttctatattctgctacactgattcattggtctatcatgcactttaaatggatcttttacttatgaatgattttgtaacatcatacatttgtcatttggaaaacattggttcactgatttacacagatcttccaaatgtttatacatttcattctacaatgcttaaaaatcacattcattaatatccaccaatcttatcagaaaaagggaaggtgtcaatgacgcccatggtgatagatatgagttttccaaaactctaacacaaaaatttatcattggccacaaatagtgtcagttgttttcctttaaatgacaggcttattttgtttatttttgagaaaatatctgccaaaaactgaagttttagtaacgatagattgttagccagtttttcaagtaaaaacggaatcccatgaaaaacagcatctgcttcaccttacaactgctttgcttgagacaagcacttcaggatacagcagaagtgcttgtgtgtacttcttattttgtgacatggaatattaaaatttaatctctagaaaatattcacttataattaatacataattattatctagaatatatgaatctaaattaaaatttaatctttggatataatagaattaatatttttaactgcttcatcaggatatccttaagtgaaacttgctttttttaaaactgtgatgacatagcagtgaaggctacaatgaccatcagtcagtacctcattgtgatgttgccttggtttatgctagggcacccacccttgcctttgcaccatcagtgcaatgttaatatatttgttgctccataaaccatgaaattaaagtgattctacactttggctatttcagtaatacttgtgttcattgataagaattcatttaaatgaatatctttgaggattagttagtactgataccagacaaatagaatcaaaacaagtgtcattctttagacttgtccattttagggcaaaagtataattctgcagattagagttctaaactcatgtttcatggcagcaactaaatatttaattagacaaattaactctgtcattttaaaattatagtcatttctttttcttgacttctgttatccagtagacattcagcaatgccaactgtacaaaagcttttagactctcagctagtgtgcacttctccagctaatgcagcacaatgatttatcctataaaatgcttcaaggactttttcacttctagtttgaaaagccctaacaaacaatattgggcttacaaagaacatacctatgtctaaaatattttattcttttttctttaaatgttcaatgattcatctcaaaatgaggctgtaacttaagtggcattaaaatgctattcaagtgttcaattgcaaaagacaataggtaaattatatacatatgttaaaaaataagagaaagctttatttgtagttttaattttttgttatttatagttttgtcctgtttctttgcattagatgccttccttctaggagtcagagcactaactctgacatgtcagtcttatcttcttcaatatctttagatgtagctgttgcagctagggttgagaaagtttctcttcaaatctcccttttttaagccaatgagccatccttaaacataaggaaaatacattttcttttattttagaactactaaatcctaaaataatacattttagataaaaattttaaaactacaagttttgtaaattaaagcattgcaaaacaagacaaaaagatatacttacttcttgttgtgtctgtacataggcccaagggaaactttaggatttcaaaatcacaatgtattggatgataatgaggttaacaaagattatagcaagcataaacaaaaataattattaagggtgtggtagaagcactgagaacaaatgagttaatctcagaaaatgcacatactctctttcaaatttctagtacacaactttactttccattaattgccaggtaataacatcatcacatcatgtccctttttgataaacttctctgtatattcataacagaatgaaagtgaaaaaagcaaactagtattatgacaatggttttgatctggagaaacatctgaaaggatcttggggactcctgaaagagtcctgtgtaccccagtagtccccagataatactttgaggactattgtgaaatggcagttatgcaatacgtgatataatgattcagtggtgtcacatcagcttaagctgtattttcatgcaatggggggtgtgcttattgcataagtaagtctgttggatgtttctcttacttgtgaagaatcaatattacattgattgccaaatttgatttttcaagtcccctacacactgtcgtaaagcagatggtaaagacagaatacctctgaaaagtcaaactcatgtcagctaaattgatagatttatcttagcatcgaaagccatgtcactcagtcccctcctactcaaccccaatataaaaaccgaaacagtgatggaatttccagagcatttgtttactccctttaactaccattgctctttgctgagtgatgatgcagggcagatggtgtcagggagagaaatcatcaactagctcaggattgaaaggggatgaagatgctagaaatgtgttgatgtttgagaaggatgtgtggaaatgaagaagtgactaaagaggacagccttatcaccaacaacataagcatatcccttgctctttaattctgccccagagggaaaggaacagggcttcagtctcaaatgagagagccacttttctagtctggggtaaagatatcatgcatacctttccttccttcccctccactgtgatagatctgagaagtgatgaaagccaagaaatattgagctgttggattttttttactaaatgctatgtatgccaagggttatttgcttaatatccttcatcttggatcaaaatggtgagaaatttaaaaccgagaatttccctgaaacactggtttttaaaccttctctagtgaaggttttttttttttttttaattttcaattacttgcagatcaatgcaaggtcctattgcacgcctgagcagtttgcaacttgcatggcatgagactcaccttatgagttcagcagcactcaaactggtctaaacacttgaacaagacagactagtccactgatcagggcttggatgtcatagcagtgtcaaattgctacaagggcttccaactgcttactctttgtttctgtatttttgtcattatacactagtaaacaagcagttctgggacctgaagcaatgctctgttattggccatcacaaatgtaaggttgaatttgccacatgcactgtctagtcaaggttaattattcctagacaactatgacttgccatctgtgtagctgttgctagatgcacaagtagaattagttatggtagtgtgggctcatcaggtagaaccattcaaagtgtatatcacttatatctcatagattagaacacatggtccagatacttattaaattattggatagatcaaatttccattaactatacctctaacacagaggctatcatctgtgtgaatatacagatgatagaacatacagaacaagaacatgcaggctcaatatttgtcactaaagttattttatcattaattattttcaacataatctaattttcttctacaatctggaaaatatttggattttttggcatgctgcatgtctgcttctttatagtgccttctttcaaatacctgaatcataaatgaagaaaaaaaaacttgagaaagatacagttgttgacatttcaaccttcttgctcttttcaaaaccaccttacctgctaacttctgttgcctctccccaccagagatgattattaattttttctttcacatggctcaactggtctgacactcttggaaaacaaatatttgtttccagcccatggaaacacacatagtgtactcaagccagaagttctgagaaagcacactgtcaggtgctgctactcctttggagaacctggctcccatgaaaacatctgaaatatagttccgtaacatcatctattattaaaagataatttttattgccttgaaatttctccttgaagagtatttccttactgaagtgttttatgtttaacttgtcaaaaattaaggaaggcatgaaagttgccttatggaactgaaggactcgcattctgcgttgtctttccagaggactgaattagtaatgtgtaaaagtggctcagaaaaagatatcagcatatcatcaggaagaggtttttaatactcttaagattttatgtattacatatatagtatatatttttagtatagctttttaaaaatagaatgggcaacttgtgagttagcaagcctccccccatttccagagcactttagcagaagctagataacaacttattggtagggtgtcctaatttatcatcactcttgagagtaaaaggggacagtattaataattagtgtgggacagcacttggcaataaactgggactgtctgggcaaaaagaaacaaatggtaaatcctacctgtgaatgatgtcatagaagagagtcctgcctgatgggggaatttggcttaggtgacccctatagtatatactcacttgactattttctgcactaccatttcctcataactttttccgataacttattttgctaatattctctaaacaggaagaagtttgaaatgcattattaaggattagattttaaattatgtttaggaagatttatgtgtaaattgtgttataattcttttaaatcctgtaacacaaattagcttgtaataatcacagaaaaaaaatcttaatgtgtgtgtgtgtgtgtgtgtgtgtgtgtataggactatgttccagctggccttattgagtgagtgttcttgttaattataaaccagtcttgagtgtgataccactgtttattattgataccttcaacctgcttctgagattcttcttatgagttagagtatccccagaatcctaaatggggaacctcacttccatattcgataagctgatgtcaattacaataaagagtatgagaattataagttagacaaaaggcaagatagttcctttgagaggaaagcatgccttacaactctatgagttgtttggaaagttaagtatttgtgacaataatgaatgaataagtacatatttaagctttcaaatagccattgacaaaaatctgaatcatggtggaattcaaaaaaagttcattatgttttctttaaaaaaatatgtggctagaaaactgtctctgagaaagattaagggtagaaattattcaacctataagtgctttattgagcatctgttatgtattaggctctgaggtaggagctaatgggtacaaaaatggtccttgtcctctgcattcatgactctagtagtgtattggaaagagatggatatttctgttaatgatatagtataacaaatgagatttctcatgatcctaattttctagatttctaggactctaaccagccttaacgtttgtataagtaatcagaaatactttgcaaaaactcatattttgcagatcaggctcacttgggtagtgaaaagacaatctttagaggatttcacagcgttttagtagtgagcaggaaaatggcagactaattgaaatgtggaaaaacctgaggtgtcatgtaaatttagaggaaaatggtccaaactgtagtcatagattcttggagtctgatcaaaggcagtgagtgtaggagtctctgtagactagttctgaaagtatctatgcaatgtgttgatgtggtcaagtagacatcatcaagaatagaaaacacactactgatgtacaaaattatggtgttttataacctaacacattatatattaaaaagttgccagtcaattgcaaaaaaaggtgtaatataaccagaaaagattctgtaaataataattaaaataattgatgaggtaagagaattatcttttatgaaaatagcgaaagcattaggattcttcattatgaaaagatgagatgtgttttcaagtgttaatgtcattgaattatgtgactgtgattttcccccaaattgaaaactactagaataagaagccttgaataaaaaaatataggctgcactgaagttctgtcaattatattcctaatagattacattagccctgagaggtggtacagatacttcccaaacaatttatataaaattatgactgcataaaaaattagtctgttcctaaaggaaagcatctctgaaagcatctctcagctcagagattcattgcaaggaaaacctctctgcctttcctgatgttttctgttatataaatacagttgaagtgaacacttggtttgacccataattctactttttttgtattctgttcaaggtacaagagaatcaaaatgacaaagcacttatgaagaatgcgccagtctattttccttaggtgtataaatagctatggttttttttctgcccaaagtcaatatttcaagtattttcttactttactaatgctgtcacaactcatcatttatagccccttcaaagggccattagtgtttcacaatatgtaatgcaggggtgcccaatcttttggtttccctggccacattggaagaagaattgtcttgggccacacataaaatacactaaaactaacaatagctgatgagctaaaaaaaattgcaagaaaacctcacaatgttttaagaaagtttacgaattcatgttggaccacatccaaagccatcctgggcctcatgcagccgtgggccacaggttggacaagtttgaattgtaacaaatgtagtcaccttcagggaagcactcactatacattttttgccatgccactggggagaaggcaagtgtgtgattcactagccctttagctcataaacatccctgctgtgtcctgccttcagttaaaaatcaggaatatcagcatgtgacttgttgcataagtatacaaactcagccagtgtctcattgtaccatttacttcactgcctctaaagttctgtggcatttccataacaaaccccagcacatgctgactagagaagaaccccagcagaccacagtgattgacttaatttggaggttaaaatgttctttctctggtagtttctattatcactgcgacttttcccgggacacaagatcagtctccccatgcttaacccagaggagttaggccagttttctgttgctgaaattcactttgcttattttcactagcaaactggtttcataagcataatcttgccagactgtatgtcatttttctccctttattgtaggaaatgattgagtgtgtgtgttgaggaaacgattgatgctttgccacctttggagggagcaattattttgtgagaaagcttgagaataattaatttatgttggattgaaaaataattggaagcatttttcagttccttttaatacacagattcttatagtaaaagcatattcatttgaaatacacaaactttagaaaactatttaattgagtagatttggatagtggactattgtaccccaaaaagggtctcttatgtctatacatttgcacagaatactagtgtatgggtgtttgcacttgaataattcccaaattggcacaaattaattagcaaatgcatgtgcttggttcttttacattgctgttgtcaatatcatcaatcttgatttccagcaagatcctgaacaccttagtcacgaattttatcgtgaaaatgttaagtgcgcttgttccatctatatgctgttgaccctaaaggtacacatccaactctgattactcttctgggcttcaaatctatatccaggcttcttcctaccaaccccagcttaaaattaaactcttggtctttccacccagacatgctcctccaatctcccagttgctcatgctggaaacttaaacatcaccttggatttttctcttgccttcactttccgcacccagtttctcagaaacatatgatggctctgccttggatatatatttagaattcagcctcttctttcttaccccttggcctcatcggcctagtcatctctttgactttggcagtagcctcctccttgctgttgtcatcctgcagttagtgtgttcttcatgcagcaaccagagtggtattttttaaaaaatagatcagatcctatcagacccctctgcttaaagtccgtgtatttttccatcaagctgacaaaaaaattcaaatttatcatggcctatgagcccctccattgtctggcttctggctccttctctgaactcatttctgagtctccgcattgttcaccctgctccagtgatactggcctccttactgcttcttgaatatgttgagcttgttcctgtctgagggcctttgcattcaccaggaatattctttcccagaaactcccgtgagtcatgccccaccccctcagttcatgtctgttttcaaatgccaccacctcattttctgaccaccctatctaaagaggcaccttcatcactctgttcttttatcctgctctattttgttcatgacacttattactttttgatatttttattcattgttgtttgctttgtcttctccattttagtataagttcagtgaaggcaaaaatttaatcttttttaaaaaatttattcactgctctatcctgagggcctagaacactgcctagcatatggtagttattcaggaatgaaggaatgaatgagcatgtgagtgaatacatgttagtcttgattatgaatatgctacagcttacttcttactggattttttctctcagttttaagcttcaaccgatttatttaatgataactacatgttttgtgaggatataaaaatggtactgaataattacatggcactttgtactttacattctgcttttacatacattgttttattgtgttaaatgtttaagaaatcatccaaagaaattccaggctagtaatacaaagacaaaaagaaaaacatttatgaaaatcttataaggagcatcactgaaactcaaattcatgaaaattaatagtatccagattttagaaatacacacatgcatgcatacatgcacacacagagtgagagatgaaaggaatggttcaagccaagcatcaataattaagttatcctgaaatattgtaaatgggtgaaaggactagataaaagtggcattccacatctggagattggaatatgggaagtcatggtcagagacagacaattatgttcaaggaacagcaagttttgctttgatggaaagagactctttataactggaagttatgaaaaactaaatgtgataatattgtgtgtgtgtgtgtgtgtgtgtgtatgtgtgataatggagagagtgtgatagcagaattaaattgtgggaagttttaaagctatagaacaagacactcctccagattttcagaagagaactgacagaagtatagagaaggatatactacttaatgaaatacagagtggattgaaaggaggtaaggtaagacacggaaaggaactgaggagattgctgaaatgtttcaagagatggaaaaatgacagagttccagatgaactctacacttgaaatcgatttctttctccatggttcacaaatgaatcatcacaatggcaatctcaagatgagagtaaccaggaaaatcctaccccaatggagattaagtaatctgtgagctgacacccccattttccccaacataagcattcttgagccatatggagctctaatagaaggaaacacatttcctggatcagctctttgcctctacaaagtagcttagagcccaaattattgatatatataatttagtactataagttacttaatagctgtcgtatttaatataagtaattattgttactttttaaaatataccaatgaacttgatcttaggattttttttcagtgactcgagctggtttgcagaccccactccataattatagacttctgttcttaaatgttagcttctttgtttggcagtattatacttgtttctttctcactgagataaatgttcctaacaaaaagagataataaatgttttgggtgatggatagtccggttacactgatttgatcattatacattgaatacttgtatcaaaatatcacagtaccccataaatatgtataactcttatgtatttacaaaaattaaaaaagaaaaatctaacatataatttttggtcctcccaattctttgctctgaaatttctaaattatataacattggcattgaaagagaccaagagatgtcatatcccacctgtaggcaagaccatatctaaaatacattagcaagatgaaaagctattgcagtacttgcttctaagactgcttagcccagtgtttccaccaaactcagggcagagctatggaggagctgaagtttgtgttttgtcttgtccgttgctcatcctcgccgctcattctgtctacctccttctttgatcttcctttctcagttaattacatcatctggaaatatggccttgtgaactaatcactttctccaggaacatttccattttaataataatcactaccagtcaccatgctaaatgctttgcatgcattatttcaaattcttaaaacaaccctcttagtactatccccatttaacaacaaagaaattgagtccccgagaacttaagtaacttggttcaaagtcacagactagcacacataattaacaagtatcagggtttgaatttctctatctgattgcaatgtctacattccttccatcacatcatactaattcttatagaaacctaaagccctcaagacttaaaaaaatgaaatttccagaagcttacttaactagctggtgaaaaatttgataaggggataaggatattccagatgggatatctctgtttatctactccacatatttaaaagtcagtctgactttatctgtgtcaggaagcaccttttgttaaaccactgtgatgctgggcttaactctacttggagagagtcttaggttccttgtttgtcagtatagttcatcagtcttctttggcaactataccccagtggacatccacatgtgttcctcataagagaagaaaagtacagtccttcagttcaggcacatggacagcttatgtgactgtcttaggcttcaggctttacctttgggtgggacatatttttatgcccacacagttccatcaagtagcatcgcatcaacttgcacctgttttactccagaacttcttcctttccaggttccagccatcttagagcgttgctagttactgacaatcaggcagatctgattgtcagaggcttctttgcattatcagaaaattatccttcatatccttgtgccacattgtcagtttcttctcatttttttcctcaatggcaatggctaaaacgccaggggctccatattgcttcagacagtacttcatctgctgctgtcatcttgcagatatcttcccttggccttttagcctcatctctcttctctttagtcactttggaggctttctccagctccttcccactgtgccccacctctttatttagttcctagaactggacacagtggttggcaggacttgaccaacacagggcacaagacagcagttaccttatattctttcttgtggctaatttctccattgccatttcctgaagccttttcagtcattcctcaagtatattcattcctatagaaaaccaagtcaggctgggcatggtggctcacacctgtaatcccatcactttgggaggccaaggtgggcagatcatgaggtcaagagatcaagaccatcctggccaagatgctgaaacgccgtctctactaaaaatgcaaaaattaggcaggcgtggtggcaggcacttgtagtcccagctacccgggaggctgaggcaggaaaatcgcttgaaaccaggaggcggaggttgcagtgagctgagatcatgccactgcactccagcctgggtgatagagtgagactccatctcaaaaaaaaaaaaaaaaaaaaaaaagaaagaaagaaagaaaaccaagtcaatgttgattttattgagatgtaagagggttatattctaaatttagcagggaagaggcagatttccctaggaaagtgctatgttgtctccttcctcagctaagtttttataaaaggttgcctttgggttttcgttgtggttaaaaatgtgcaattgcttgttttgcaataggttttgttctgtgttgctacaattttctcttttatatattgtttttgcttacaattaaatccaggaaaatgtggaagaaaaagaagtgaaataatctcacagctgctacgttttcctggaaggcaaagacacctccattttaaagttagttttaaaacatgaaatcattgttctttgaaacagccatctggtcaaagacccctttgtagagtacatttttaaacaacaatttttaaaaaccactaggagctttgtaaatattttctttatctgggttatgaattattttcagccttttgagtaattgttaaaatgatgaaacttactggaataaaacagatgtctgttttttgttttgtttttaggggaaagaggaaaatgtcattgggatattgagatttacttggtaccttgacagtgaaatctgaataaatggttgttagtgtccttcttagcaatccatttaccatccttttttttctctctgtaatgccagaatataagcttcatgagaatagcaaccttatctctgttcatcgctatgtacccctaagggcctagcacaatgcctggcacatagcttctcaagacatgtttatcaaacaaataaatcaagaaatgaataccataggaacattatacagaatgacttttcatgtaatcagttacataattcatttgtccttccattttcttctacagagacacttggcatggaagtctcccttaatagaaactttcaggttgaagatatgcctaaaaattgctaccgtttttactagtccattacggttctcttatccatgatttttatgtaaatcaactctaaattgtttatacttttaccacctctgaggacaataaatcccacaaatagaagggagttatggttcaactcaatggatgtataagtaaggcattaagtgaatacagagggagaataatttatgcaattattgctaagtgggctagactcagaggaaggaatattccagttgaggctgtaagggtgagtagaaatttaccaggtggtgaagcagtcaggggaatagaggcaacaatgcatgaaaagtcttaaagggatgaagggcatgccatacagtccctcacctcaggaccatcaccagcactgtcatcatctgtctgctgaaatatcactcatgcaaaacacaggctgccactgaagtgcatgattttttaaaattgagaatgatattttttctttgaagagtcggttatatccattattttaaaaactgtcagttcacctgaaacagcctccccaaacgaatcactctatagccaagcctcatggagaccaggtttttaccaactttttgcagcaagactacttatgtggcccagactttgggccatgaataattttgtgcaaaactcaccccatcccaatctcactgaatgttagcagtggggtgctgcagagtctgaatgaaggtggcggtggtgttggtgatttccctgggtggggccaggggacacagcatcttgggcccaagcacatcttaggcaaccctatccgcaaaggcccaaacttcccagatgcatccaagacatctttttgaagcctcagacagagcagtagtatgaagacctatttttccatgtaataaaggctcatataaaacttttcaaaatcagttcaaggaactcactttgatatgacttgacatgaatttaaataacaacaataataataccaagaggtaataatttagaaataatttgaaagccgagttttgtggggaaccattacataaaaccattggcaccatgatcctaccactctcattcttctgaaattttcctccacccttttctgtttcacagtatcttaatgttgataaactaacacagacagccccaacgcagtcccaggctcttagagctcgcatctaactccctctgggtgtttgtgggataacatgaatctgcaactgtccatatgatttcacgattgttgttttttggcttcttgacctacgttatgccttctgggataagatgctgcttgccttgcattgatagttcctcaaagatcttattttttagaacttttaaagtgagttatttatatatatatatatatactattatcatttagtcattaactcaaatgaaagatcccacacagagtaatttttatacatagtaaatatggaaggaagaggccaagctagcacagactgggcagcaatttttcctgtcatgtgaaaagtcatggcatgggtggaccaatggcctctctctctatttattcctctgatttcagaaatgctgagtttcagcaggctattaccatatattctgacctaataaatgagacagactgagaataattgtggttctctctgctttcttcaccagttccttttattccattccactcctttcattgctttgcgctaaatgaaatttggattgcaacaacaactttttaaaaatgacattgtaatattggctaatttgcctggtattggttatgcccaagtagacacatgacctgtggctgtttggcttgtccccctatgggaaaatagtttaatgaagctaatacgttgtactaaaataaaataaattcacatggcacccagcatcacagccacaagcaacatggttattatttattaccctgagacaccagccccacatctccaactgcctactgggcattttcactgtgagggccttctgtcgcttcctctttaatccatctggaaccaaaaccatcaccctcctttcaaagccatgcctcactattggagttttagggggccaattaatcataccagttacttcccctgtctagttaaaattgttgctgttgctgtttttagaagcagtacacaaaaagcaaacagataaggcatgaaacaaatagatccagatctgtggccaaatgtcttgctcatacttcaactcccagtaatcacaaccacagctgagcaaccacagacctctaccagagggcagagctcatcagaacatcttggaataggagagaaatgcctgtgtcctgcaggcacgtcttgctcaatttctcctttatagctcaccagtcaaatcagccagtcctcctcttttgaggggaagaaaatgaaggctaaggaaaaggggccaagagctgaagtcccttcaagaggccaggagatcaagttcccactaactcatcactcccgcattttctatttttgtttagatattttctttgtttatatgacatcaaattattttagcatttggggatgagaaaaaatagttagatattaaacatcctatattgtgagaggtttctaccatttaaattgtaatctattttctttatgacctttttcaccataaataagacccccacagttataaccaaaattcacactttcagctcattacttgttactgtgattaatgctgacaaggacctggcaccatggccattggcagccagagaaggtcaggactagtggtgactcagctgactctgcagctgcacttacagtaaatgtgttttgcaatgctcttatatttaaaaatattttctacaaatttttaattcttatttaattttctattcatgttttattatcatttgctctttgctatatcaagagaaggaaataacagatcaaatatcaaatcaactgaggtccaaaaaactcgtccctttggcaatgaatcatggtactttgagacaacaggcaacggtcaacctccaatttgaatggttgttgcattgatctttgaggatgctatagaaagataaggaaaaaagtatttataatatatataaaatatatatatatatacacatgcacacacacacacacacacacacacatatattttttgagacaagatcttgctctgttgccaggctgtggtacagtggcactatcacagcttatttgcagcctctaactcctgggctcaagccatcctcctgcctcagcctcccaaagtgataggattacatgagccactgtgtctgaccaaggaaaagtattttaaataaatgagggatactaagctaattcaaccattggcgaacactttattctgtcatgcattcattgcaaattattaccaaacaccagcgctgtgcttaggttctaagaggaacatgtcccctattctcatggaattcacagtatagtgagagaggctgataacaaacagtaattacttaatcacaactgctaattacaactactgtgagaatttataatacagtgacctgtccatttggggatttcagggaatggtcaaaactaacactagaagaatgcatagaaatagattaggtgaagggagaaggggagattgttccaggcagagtgaacagcatatgccaagaccctgaggtagggagaagctttgtgtgttcatggaactgatagctggagcctgatgggcaagaatcaggggccagatcatttatgatcctacaggccatgttagggttgctttgttggtctttaatgcagcagggaaccactgaaggggagtaatgtggttcagtttggctgcagaatggagagtagagaggaacaagtgcaggagttgggtttttgtaatacagataagaggtgatgacatcctggactagaaagatggaatagaggaataaatgggagctattaactggctacgttgacagaactgactgattggaaatgaggtaggggagaaagagatgtcgtgaatgacacctaggcatctggcacaagcatctctttggaagaagctgccatttactagtaggagggaactttaggggaagagaagatttgggagcacatccagatttcaaaatctgagatatcaagagagcaactgtagctcagagatgtctggcatttattagcggtcagtttatatatagtactaaatgcaagtagtctcttagtatttctcatagaaagttatcttaggaaaaaatcctagctggtagtaatgcctgggtctttaaatttttcattaagttccgtttcctaatatatatttttaggagtttcacatttctattcatgagtgagattggtttaaagcgatatattgaaaagtttgttccttttaatactagccccaggagaagctcaagggggaaaaaaagattcaaaggtgaagtaagcttgggaagtcctgtatagcctattcatttcttggagatttaaaatatgtattagactattataatttctgagaggttctgaataaaagaagcttactcttaaaatctagggaaaaaggtatataaaactctctgaagccagaactattgtggagaaaatttttaaatttttttccaatttatcctgtagatactggtcagatgggattttattattttggtgttatatttcctatatgtaacatccataattgatacaaatttactatcataaaagcatacttagaatctcttaagataatttaatcttttgtctgttaactatatgtcgtctcatttctaattttgttttctcatcttttatattacagaattctgttttattgtctgattcattagagaagaaactcctaaatgtaacaataacatatttggttctccacattaattcttgactttataaaatattatattcttctttgcttcgttttataattttccaacttgctcaatttaatgctgacaatctattttttgtttctttttaataataaagtgtacctgattgtgattttgtctctgaatagagttttggttgcatgttctaagtttcaatactgtgtgtaaggttgtttagtaaacagtgtgtaattatacttttgagttactatttgacaaaaatttgcatggagttttaatttatctgaagtggttttgttgttctttcctatttaacttttatcataatttgtagttttattgtactgttgggttttctttaactgtagatatgtgaaatcagcaatattatctgtaaggtaaaagacaatttatagtcctaatttattaaatttatattattgacatcataggtttgatgattaatttgtgataatgtaagatctttgtgtcattaatttattgtcaataatctttgaagaactttgaatgctgagaaaatactggtgagactagtcagtcaacaaatattaatgagcacctactatataacataaatgctaggaatatattggtgaacatttaaagctccatcaatggacttgtgctgtagttagatgaggcagcagatagttaacatacctaattttacatacagataattgttatgatgaaaacggaataatgaaaagagtaagaatgggtgaagggtggcaggattttagctagaggggttaggggaggcttctctaggggatattagtggattatcaatgtgaatgagatagaatatcatttccagcaaaaggattggcgcctgcaaaatcccaaggaagaaacatgcttggcatatttaagaaactgcaaataaaaaggccaatgtggctggagcagaatgaggatgggaagaatgaaaatgcacatttgaaacagaggaggaaaatgagggggcaagaagtccagacctttttccactcgccgtgagaagtgactggaggatagtaaacagggtggtgataaaatatacaatctctgtggcttctttgtggcgagtggagcaagaaaaccatcaagaagatgttataagttgtgataatcatcccaatgagagaagatagtgacttggatatgggaatctgtaggtcaggggagagatctgaactaagccacctttaaatgatatgaaaggccaccatactgggaagattaccactggagaaattgagagtgaagtaggccatgagagaaccctgggacacccccagaatttaaaggcctttaagaggaagacgagacaaaaagagattaagaagctgtagtcagtgaggtagcagtgtgggagtcaggcgggtgtgatatcacagaagcctggaggagaaggtgtttgaggacagagggggagtggtcaacaaatgctacagtaaagccaagtaatgtgaaaacagggaattgacaatttgtttgggcaagatgtagatcacatgaccgtgaaaagcgctgtatctatagagtagcaggattacagccctcacttgggtggactgaggaaagaataaagagggagagaatggaaaaataattcaagataactcaaggagttttgctataaaggcaaatagaaatggggcagttattgggagtgaagaaaggtctagagaaagtgtgtgtgtgtgcacacgcatacatgtgcgtgtgtacacgtgtgcacgcctgttttcagatggctgcttttaaggcatgctagtatacaatatgaatgatccaagcagttgaaaggaagaaactgtataaaaggaatgaacacagggtggaagttcatgcggaccttaggagagacaggaccccatgtctcagttgaaggtttggccttccattatacaagataaaggcagaatctgtggttgcaaatgtaggtagtctcatggatttgttggaaagaagatggattattcttatctgattatgtattttttcactgtgaagtatgaagcaagattctccattaagtatgagtgaagggtatattagagatttgagggaagaaaatgtatgtagtagtaatcatctggtaaagtgagaaagcatatttactacagaattgtagtaaggatgtctggaaaggctgggtacccatttgatagttgtagttataaatctgaagtgagtgcagtcagcacagttgtatagttttggtcttgcatgatttggcaatctggatacagggtctgagtaagaaagtaatttgactggagttttaataaaactggtaatgacataggactatgatgttagtctgaatatgcagataatgtaaaacaggaagaaatatgaatatattttttgccagaatcaggattcagacatctgagcaaactagaaggatgggcccagactaacacaatgaaatataataatgctaaacaaaatttacttttatattttaaaaagactatatgcattcagtataggagaggcctggttttataggaggtcacgtgcacaggacctaaaggcagtggaaataataaatgataaaagtgtttgaattttgtatatttttcttatatatttaccttatctttggcattgtgttaagcaagctcttcacatatataatccatttttcattataataagcctcaagttgatattataatccccattttataggtaggttaacagattcagaaaggttgcctcaggcagtgtcacataagataataaatggcacaaaatggatttgagcaggtgttcatggtctttaatatatcctgaattttactcatcttacattagcaaatatttattgtccagaaaacaggcaaaagttccaccaatatcttttcttgcatctggagatttgtgatcagctgctggcatctcagtttctgaaaatccttttaaaatagaacaaatgcataggagagctaaaaggatgttgcattaattagaaacctattcatatgggaaacacttgaaaatattggctgaagggttggcttagagaatagaagacttcacacacacacacacacacacacgcgcgtgcgtatattccttacacgcaactattaagttggtgcaaaagtattgcggtttttgcaaaaactgccattacttttgcattaacctaatatgtggtttgtgaaaatgtttatcaagtcatggtttcataaattatacccattttaaattcactagacaagtttactatttaaaaaaatgtggaatgcatctgttggaaacatacatttaagaccctcccaaaaaatgactaattaacatatgaaaaaaagttttcatttcactggcaaccagaaattgtaaaataaaacagccatccagatatcatgattgggctttcagaataggagacgtgagaaaggtcatgataggtggtaatgaggaagctgtcctcctcatgtaatacatgtggccgactgtgcgtgtagcctccctggaggccagtttgggaatctgcattaaatgccttaattaggtgcaaaccatgtggcccagaaattccactcctaaaagtttatttttatcaaatgattcaataattgtgcaaaggaatttgttcaaagatgattttgaaacattgtttataattgccaacattcactatttaggctcagatgtttgaacagctgacataggtaagggaattaaactttggatttttaacacccaaaggtattcttatgaaatgttaatgaaagttacacatacagtcaaaacatggtctcatcatgaggtcctgttctctttagtgtaacgcttaaaagccttttacctaaggcataaaatttctcatacttcttttttagcattgaagtgacttatttctttaaactaaaacacatagttcagcttggttgtaatagtggaattattcagaagctcatatctgcatgattgcagctgaaatagactaaacaaaaaaatgcagtcagtacaaattgctgtgggttatctatacagctacagcatgtggtgagaacctggaagcttcatcgacagaatttatgagacttccagtaaatcagctcagttcagtgttttagacctgtatccaactctccttggatgtctagacacagcctaagatgaggcttcgaaaatgggtaaaaatgaagcagccaaagccaccagaagcctttgaccctcttctaatgtttcaaccagataattattttccctctcaagaatttggctatcctttaagaggaaaaaaaaattaagattttccagtgaagagcccctgaaagaaaatactctggagaaaggtcagtgagaatgggccaaagctgaattcttcagatctattcagagaatgtggaaagtctgtgccctctgctttctgtgccttccagctggccacgcgctcccatgacatttgtccagttctaccttccccatacctttacatagtaaaggaattcatactgtgcagtgggaagacctccaaatggaaacctaattgatagctaaaagctatggtagaaaggtaattagataatcaaaaactgatgaattttgattctgtcaagataatccatcactctttctgctctaaagcaaagatacaacttttgaaaatttccaacaataaactttcatgcttggagaatatatttcttttaaatgtgtccctcttttaattgaaatgactcattctgcttgttttggtttatccttttaaacttgaatatcttaggttttctataaaaagtttagcatctggtcaaaaatgaaaaaggtggtttaaaaaataagcactgtccaagtttattccattgtgttttcattcatttatttgtccattttcttattcattcaacaagtgtttgttttatggaggctataaaccaaggattggggtagacccagattatgccacttattagttatgtgatcttgggaacaccctttaatatctctgaatttcagtttcctcatctgtgaaacagctttactaccaactttacaggattgctataaagagtaaatgagattatttatcttttaaaatggtaaaaagttaggccaggtgcagtggctcaaacctgtaatcccagcactttggaaggccaacacaggaggatcgtttgagctcacaagttcgagaccagcctagacaatctggcgaaaccccatttctacaaaaaataccaaaattagccaggctgggactgcaaggctgtagtcccggctacttgggaagctgaggtggaaggatggtttgagcctgaaaggtggaggtggcagtgagccaagatcgcgccactgcactacagcctgggcaacagagccagactttgtctcaaaaaaaaaaaaaaaaaaagtaaaaagttataagtttcactttcccccttctctatttattatttattactataccccaaaagtcatacacaacaaagatggaaatcctcaaagacacagaaaagtagagatgtcagtcaacgtttgcaagactcatagattgaactggattgaaaatctatcagtgaccagtgaatgctttgccctgattaagaaaaatgaggccaaacaagaagacaacccaaagaagcctctatgtttcttcactacatcaacttgagaaacgtgggcactgtgacaaccagaaatccagagaggcaactttgaactataaggccaactcaaaaaacgaatccaagtaagaatttacaacggggaagtccaggtagaagatgcctgatggtaaatatttattcaagataaacatgtagagttccatctaataaatgcttaaatataacaaaactgaatacaattaaaagaaggaaaagatgtgaaaaaattcagaaataatatgtcagtatttctagatagattagcaaatgtcatgaagaaagcagcagaaagtaaaagcttctaaattcttcaagaagtcagagattatttttgtattcctgaattgtatgtgtatatataaaatatacgtatatatatacaaaagtgaattcaagaatgattttaaaaactgaaagataactgctgaaaaatatagaagccaaaaagccagcttatttgttaacaaaacaaaagaaacagtcagcatttaaaaacagcaaattgtatctcaaaatgataaaactaaggctaagcacacagtcatggcaagatataaacatgattgaaactttcctaatcaaaaatgatgattttctgattgagattaaaaccaaaacccaattatactgttgacatttataataggacttttaaaaagtaaaacaaatggaaaaaaatgtaaaaataaaagaagaaacaaagataggtcaggcaaatgcaaagaataagtgaaaagactttgaaatactatacaaaaatattgtattatatttttgtaatgaaatcagaacaaagaacttcatttctataaacatactaaaatactcaaagtccttagcaagcaaccattgatggagaatcacttttaagttataaaattagcaaacatactttaaagatgacagtcaatatttatgcgtatgagattcattactcaataaatatctatggaatacctactagtgctggtcactttgtgagaccttggggtacagtgtaatcaaatcaagtcatccaaatatcccttttaatttattagaggggttggagcagagccacagggcaacattcagttcactgccaagatgatgccagcattcagacaagtctctccaccaaagcactagttgtgtgattccttctggaccccttggcagatgattttgattgcaggctcaaaggccaaatggtctgtagccaaggcccttgggggactgggtcatttccaggtttgaacctgggagcaagcttggtggatcagccacctcagtgtcattcgatactctcaaaacaaccctcctatgtctagggcttcatcagtgtttcacaaactcctacctgaatcctgaggctcccagaaagagacttctgactatacagggatgtggaattcttgttgctgtaggggaatattagcaggtgaccttcttttccaccatcctggtgatgtcacacctccctttccaattataagggtttgtttcgtgctattcaataagatattatcatttccttaatttaaaaaaattcatttctatgtattttaaaggctctgctcctaatgtgaatggagtcttttcccatttcctaagttatttgtagtactgagaaaagcaattgatttgtatattttcatcttgcagttaatgttagccttttaaacatagcatcttggccgggcacagtggctcacgcctgtaatcctagcactttgggaggccaaggcggactgatcacctgaggtcaggagttcgagactagcctggccaacaatgtgaaatcccatctagactaaagatgcaaaactcagctgggccttgtggcatgttcctgtaatcacagctacttgggaggctgaggcaggagaatcgcttgaacctgggaggcggaggctccagtgagccaagatcatgccactgcactccagccggggcaacagagcaaaactccatctcaaaaaaaaaaaaaaaaaatagcatcttattaattttggtagtgttttgttaaatactaacacttggatttttcaattcttcttgagttaattttggtaatttgtatttttaaaggtattgttaatttattctagattcttaattttttgccatagggttgcatataatattttaattttttcaacctcttctatatttgtggtcattatcctattgtttctcatttgcaatcttgtatacttttgttttctcccatttccccccttaattaggattgtaagtgtattatctactggtaaagggaaaatacttgtggatgtccttaacctctgttatttttatatttcctatttccttaattttggccttaatctgtgttaattctctttgttggtttattttattttttaaaaatcattttataatttatctagatgaataccaaccttcttttctaaatgatgagcatatttaaggttatacattttcctacagcctttgctcctttggatatgaagcgtttatatctttattgctttctaaataatttttacttttggtttcttctgtcatacaaggtttatctgggagtatgtttctcacatttttcttttatacttttttattagaacttcatatgcctcagttgtatcttttctcattaattccacctgattgtacttttgatgtacatatttgtgtctttctaaatctcagggaaagcttctttttaaaaaaatatgtcttttataattgtttttctccttctatcttccttttctttttttctggaactcctcttgttcacaagttagacattctgggtctttcctccacaccctcatcatttctgtccttttatatttttccacttctattagatcttcaaagctgctaattctagtctcaacaatgatcagcctttcttgctatttatctacttaatttttttaatttaaaaatctgactttttagttctaggaagtcttttttaatgctgttcgtgtgcctcttcaagtccttattttcttctgtcttctgctttccccaaaggttctccttcattgatggactgctgtgattgctttcctcattctttccctctctgactgttagcttctttaggtatcctttcattttcatttgttcttcatggcacaagtccaactgctggacgctttaagtgggctggtcccacaagtgtgggaaggcacagatgtctcagttgtcatgggccagtaataggcactgctatgggagactcaggggagccttctgcattagagtagaaaaacttagcccctccacaccttcttaggaccagagagtcaggcccacttaaaggtcctgcagtcatcaaagacagctcgaccaagaatctgatgtttgctggttcttgtcctaaagctagaaagtgccacaacagatgtcttgctcacaccctgtctacctgagtaccactcccaatatctgcttgacttgagaaaagaggacctgtttgaactgagtaagaagtggagaggaaatggaacactcctaagccatcatcttcccggaatccccaggggatataatgttgaacataaaaatgatacatttctctttccattggagtttatgggctagttgagaaggtagacattaatgaaaatacataactaaatataaaagcaagagagaaagaaaaaaaggaaggacagaaagaagaaagaaagaaagagagagagagagagaaagacagagaaagaaagaaaggaaaagaaagaaggataaaaagaaaaacagatgcataattctgaaatcacaactgtgatgagtgctacaaaggaaaggtaaatataatagaaaggggaaaaatgtatgacagaggagctggcctggtaggactgtcagggaagtgatgcctgatgaagtgatgactgagttgaaatcccaagatagagtaggaattaactgtgcaaagagagatggaaagacagctgcaggcagagagcagcatattcaaaagcattggaagtaagcgtggcacatctgacacacgaggaactaaagaagtccaaggtggctggcacagaaagagcaaagtgttcaaagaaactggagaggaacataatgactgcccagaccctgggggctttgtgggccatcatagggagtgtggcctttttcctaatagcacataaccatcggagtgtcttacttcagaagatcatgaagattcagtgcagataacaaatttacttatttatttaatatcaacttactttattttatatgtgcaggtttgttacatgggtatatcacatgacgctgaggtttggtgtacaaatgatcccattacccatgtggtgagcatagtacccagtaggtggtttttcaacccttcctccctttttccttccccatctagtaatccccagtgtctattgttcccaactttgtctatatgtgcccaatgtttagctcccacttataagtgagaacatgcagtatttggttttctgtttgtgcattaatattattaggataatggcttccagctccatccatgttgttgcaaaggacataactttgttctttttatgggctgcatagtattccatagtgtatatgtgccacattttctttatccagtccactattaacagacacctaggttgattcaatgtctttgctattatgaagaatgctgcaatgaacatacaggcacatgtgtgtttttggcagaacaatttattttcctttgggtatacatacccagtaatggaattgctgggtcaaatggtagttctgcttttagttctttgagaaatctacagactgctttccacagtggctaaactaatttacattcctaccaacatcacataagtgttcacctttctcctcagcctcaccaacatctgttattttttggctttttagtagtagccattctaactggtgtgagatggtgcctcatcatggttttgatttgcattactctgatgattagtaatgttgagcattttttcatgtttttttttgttgcttgtatgtcttcttttgataagtgtctgttcatgtcctttgcctactttttaatggggttatttgtttttcacttactgaattatttaagttccctataaattctggatattagacctttgtttgatgcataatttgtaaatattttctcccgttctgtaggttgtctgtttaccctattgatagtttcttttttgctgtctaggagatctttcgtttaattaggtccctcttgtcaatttttatttttgttgtaattgcttttgagtatttagtcataaattcttgccaagaccaattccaggaaggtattttctagattttcttctgaagttccccacctacaaccatctgatctttgacaaagttgacaaaaataagcaatggggaaaggactccctattcaatagatggtactgggataactggctagccatatgcaaaagaatgaaactggacatttacctatcaccttataaaaaaattaactcaagatggattaaagacttaaatgtaagatctaaaactataaaaatcagacagcaagttaaaagaggccatgggattctgggagaccaatgaggaggctattgtataataatagtccaaaagagaggtgattataataacaatttaaagaggacacttttatgtagtaaaatggaagacaggtgataaagagtgaaaggtgtccaaaatacccctaaagtatctgaattacaccactaaaatgggaacattggaagaagaccaagttgtaaatcacctgttcagtttttcacatcaagattccttggcaatactcaagagcagaagtcaataggcagtatgactctggggaaggtctagacaggagatataaacacatgggccttctgagtttaggtggagatggaggctcttaggcataaataagcacaacttgggagagaataagggagaagaaagcttgttaatcttgtatactgctagtgtgtctaaattggactatcttttctggaaaggtaattaggagtttttattgttttaagaatgatcataactttaggctgggaatggtgggtcactcctgtaattccagcactttaggaggtcgaggcaggaggatagcttgagcccaggagttcatgaccagcttgggcaacacagtgagaccttgtctctactaaaaatagaaaaattacttgggtgtggtggcacatgcctgtagtcccagcaacatgggaggctgaggtggaaggatcacttgagcccaggagtttgaggctacagtgagctatgactgtgccactgcactccagctcaggcaacagagagacatcctgtctctaacaaaaaacaaaaacaaaaaacctttagatcctgtaactctatttataggaatccatcttcagaaaataatagtagtaaatgtgacaagtgctcatggatgaaaataattatttaagtattatttatgatagcaaaacaaaaaggaaaattatttaattatctaatattaggagaaggttaaatcatcatacatttatatgaatgaatattatgctactataatctgacatttataaatatttaatggtataagtaaatgaccatgatataacagtaagtgaaaaagcatgacacaagataatagagaactagagaggaatagagggtgggagggagagaaatagaacctcaactatctgaaaaataggtacaatgaaagggtataagaaaataaggttatggtcccgttccaagatgaccgaatagtaacagctctggtctgcagctcccagcgtgatctactcagaagatgggtgatttctgcttttccaactgaggtacctggtttatctcactgcgaccagttggacagtgagtgcagcccacagaggacgagccaaagcagggtagggcatcacctcacctggggttggggaatttccctttcctagccaagggaagccgtgacagactatacctggaaaaatgggacattcccgactaaatactgtgcttttccaatggtcttagcaaatggcacaccaggagattatatcccacgcctggctcagcaggtcccacacccacggagccttgctcactgctagtacagcagtctgagattgacttgccaggcagcagcctagcagggggaggggtgtcccccattgctgaaacttgagtaggtaaacagagcagctgggaagcttgaagtgggcgcagcccactgcagctcagcaaggcctgctacctctatggactccacatctggggacagggcatagttcaacaaaaggcagcagaaacttctgcagacttaaatgtccctgtctgacagctctgaagagagcagtggttctcccagcatgatgtttgagctctgagaacggacagactgcctcctcaagtgggtccatgacccctgtgtagcctaactgggagacacctcccagtaggggctgactgacacctcatacaggcaggtgcccctctgggatgaagattccagaggacgggtcagacagcaatatttgctgttctgcagcctccgccgggtgataccaaggcaaacagggtctggagtggacctccagcaaactccaacagacctgcacctgagggacctgactgttagaaagaaaactgacaaacagaaaggaatagcatcaacatcaacaaaaaggacatccacaccaaaaccccatctgtaggtcaccaacatcaaagaccacaggtagataaaaccacaaagctggggagaaaccagagaagaaaagctgaaaattctaaaaaccagagcactttttctcctccaaaggatcacagctcatcaccagcaatggaataaagctggatggagaatgactttgatgagttgacagaagtaggcctcagaaggtcagtaataacaaacttctccaagcaaaaggagcatgttctaacccattgcaaggaagctaaaaaccttgaaacaaggttagacaaatggataactagaataaagagtgtagagaagaccttaaatgacctgatggagctgaaaaccatggcatgagaactacatgatgcatgcacaagcttcagtagccaattcaatcaagtggaagaaagggtatcagtgatggaagatcaaattaatgaaataaagcgagaagagaactttagagaaaaaagagtaaaaagaaatgaacaaagcatcaaagaaatataggactgtgtgaaaagaccaaatctacatttgattggtgtgcctgaaagtgatgggagaatggaaccaggttggaaaacactcttcaggctatcatccaggagaacttccaacctagcaagggaggccaactttcaaattcaggaaatacagagaacaccacaaagatactccttgagaagagcaaccccaagacacataactgtcagattcaccaaagttcaaataaaggaaaaaatgttaagggcagccagagagaaaggtcgggttacccacaaagggaagcacatcagactaacagcggatctctcagcagaaaccctacaagccagaagagagtgggagccaatattcaacattcttaaagaaaagaattttcaacccagaatttcatatccagccaaactaagcttcataagtgaaggagaaataaaatcctttacagacaagcaaatgctgagagattttgtcaccaccagacctgccttataagagcttctgaaggaagcactaaacttggaaaggaacaactggtaccagacattgcaaaaacatgccaaattgtaaagaccattgatgctaggaagaaactgcatcaactaaccagcaaaataaccagctaacatcataatgtcaggatcagagtcagacataacaatattaaccttaaatgtaaatgggctacatatcccaattaaaagacacagactggcaaattggataaagaatcaagacccatcagtgtgctgtattcaggagacccatctcacatgcagagacacacataggctcaaaataaagggatggaggaatatctaccatgcaaaaggaaagcaaaaaaaaaaaaaaaacaggagttgcaatcctagtctctgataaaacagactttaaaccaacaaagatcaaaagagacaaagaaggccattacataatggtaaagggatcaattcaacaagtagagctaactatcctaaatatatatgcacccaatacaggagcacccagattcataaagcaagtccttagagacctacaaagagacttagactcccatacaataaggggagattttaacacccactgtcaatattagacagatcaacgagacagaaggttaacaaggatatcaaggaattgaactcagctctgcaccaagaagacctaatagacatctacagaactctctatcccaaatcaagagaatacacattcttctcatcaccacatcccacttattccaaagttgaccacatagttggaagtaaagcactcctcagcaaatgtaaaagaacagaaatcacaacaaactgtctctcagaccacagtgcaatcaaattagaactcaggattaagaaactcactcaaaaccgctcaactacatgaaactgaacaacctgctcctgaaggactaagggtttaataatgaaatgaaggcagaaataaagacgttctttgaaaccaatgagaacaaagacacaacataccagaatctctgggacgcatttaaagcagtgtgtagagggaaatttatagcactaaatgcccacaagagaaagcaggaaagatccaaaattgacaccctaacatcacaattaaaagaactagagacgcaaaagcaaacaaattcaaaagctagcagaaggcaagaaataactaagatcagagcagaactgaaggcgatagagacacaaatacccttcaaaaaaatcagtgaatcgaggagctcattttttgaaaagatcaacaaaagtgatagaccactagcaagactaataaagaagaaaagagagaagaatcaaatagatgcaataaaaaatgataaaggggatatcatcaccgatcccacagaaatacaaactaccaccagagaatactacaaacacatctacacaaataaactagaaaatctagaagaaatggataaattcctggacacatacaccatcctaagactaaacaaggaagaagttgaatctctgaatagaccaataacaggctctgaaattgaggcaataatcaatagcctaccaaccaaaaaagtccaaaaccagacggattcacagccgaattctaccagaggtacaaggaggaactggtagcattccttctgaaactattccaatcaatagaaaaagagggaatcctccctaactcatttcatgagtccagcatcatcctgataccaaagcctggcagagacacaacaaaaaaaagagaattttagaacaatatccgtgatgaacatcgatgcaaaaatcctcaataaaatactggcaaaccgaatccagcagaacatcaaaaagcttattcaccacgatcaagttggcttcaccatgggatgcaaggctggttcaacatacacaaatcaataaacataattcatcacataaacagaaccgaagagaaaaaccacatgattatctcaatagatgcagaaaaggcctttgactaaattcaacagccttcacactaaaaactctcaattaactaggtactgatggaatgtatctcaaaataataagagctatttatgacaagcccacagccagtatcatagtgaatgggcaaaaactggaagcgttccctttgaaaactggcacaagacagggatgccctctctcaccactcgtattcaacatagtgttggaagttctggccagggcaatcaggcaagagaaagaaataaagggtattcagttaggaaaagaggaagtcaagttgtccctgtttgtagatgacatgattgtgtatttagaaaaccccatcatctcagcccaaaatctccttaagctgataagcaacttcagcaaagtctcaggatacaaaatcaatgtgcaaaaatcacaagcattcttatacaccagtaacagagaaacagccaaatcatgagtgatctcccattcaaaattgctgcaaagagaataaaatacctaggaatccagcttacaaggcatgtgaagcacctcttcaaggagaactacaaaccactgctcaacgaaataaaagaggacacaaacaaatggaagaacattccatgttcatggataggaagaatcaatattttgaaaatggccatactgcccaaggtaatttataggttcaatgccatccccatcaagctaacaatgactttcttcacagaattggaaaaaaaccactttaaagttcatatggaaccaaaaaagagcccgcattgccaagacaatcctaagcaaaaagaacaaagctggaggcatcacactacctgacttcaaactatactacaaggctacagtaagcaaaacagcatggtactggtaccaaaacagagatatagaccaatgggacagaacagaggcctcagcaataacaccacacatctacaaccatctctttgacaaacctgaccaaaacaagcaatgaggaaaggattccctatttaataaatggtgctgggaaaactgggtagccatatgtagaaatctgaaactggatcccttccttacaccttatagaaaaattaattcaaaatggattaaatacttaaatgttagacctaaaaccataaaaaccctagaagaaaacctaggcaataccattcaggacataggcatgggcaaggacttcatgtctaaaacaccaaaagcaaccacaacaaaagccaaaattgacaaatgggatctaattaaactaaagagcttctgcacagcaaaagaaactaccatcagagtgaacaggcaacctacagagtgggagaaaaattttgcattctacccatatgacaaagggctaatatccagaatctacaaagaacttaaacaaattttaccagaaaaaataaacaaacaaccccatcaaaaagtgggcaaagcatatgaacagatacttctcaaaagaaaacatttatgcagacacatgaaaaaatgctcatcatcactgatcatcagagaaatgcaaatcaaaaaccacgatgagataacatcttacaccagttagaatggcgatcaataaagtcaggaaacaacagatgctggagaggatgtggagaaataggaatgcttttacacggttggtgggagtgtaaactagttcaaccattgtggaagacagtgtggtgattcctcaaggatctagaactagaaataccatttgacccagtgatcccattactgagtatatacccgaaggatcataaatcatgctactataaagacacacgcacacgtatgtttattgcagcactgttcacaatagcaaagacttggaactgacccaaatgtccatcaatgatagactggattaagaaaatgtggcacatgtacaccatggaatactatgcagccataaaaaggatgagttcatgtcttttgcagggacatgcatgaagctggaaaccatcattctgagcaaattatcacaaggacagaaaaccaaacaccacgtgttctcactcataggtgggaactgaacaatggaatacttggacacagggtggggaacattacacaccagggcctgtcatagggtgggggctgggggagggatagcatgaggagaaatacctaatgtaaatgatgagttaatgggtgcagcaaaccaacatggcatgtgtatacctatgtaacaaacctgcacgctgtgcacatgtaccctagaacttaaagtataataataataaaaatcttaaataaaaaaaagaaaagaaggttatctctaggctgtggaaactggatgattgttaccactttaattcttttctctactttccaaatatttaaaaatgggcatgtattgcattttatgtaatatcaggaaaagaaatataaaaggaaaatactgtccccatcataaatatgcacttcattggcatctcaccctattaaacactggttatcagtctttccttttcacaatttaatgagcatttctgttttgcatctggcattgtcttttaggtttgtaagattattgccgtgcatcttaaagttttatgagctatttagtcatttagactcataaaatatcttcagagaattgatctagcggctgagcaatagcaattccttccccacagcacaagttccaatcagttcacacccagtgtataatattgaatacatttgtatttactttttaattttgtagcagtacagataactctgagctttgtaatgtgattttttaaaaaattatattgtaaatacatgtagaaattcactaattattttaaagtatgagttgtttttgttttccttcagtgactgtcagaaactgtccatttggattgtcacttacatcatcatcgtctacagcaacataaaatgactttgaatttggttcaaactaaaagcatgattttttttttttttaactccaggaatgtatacaaagactatcgcttccttgagctggcatgtgattcccaggaggatgtcgacagctggaaggcatctctactaagagctggggtctatcctgacaaatctgtagtaagttggatatatctcttatgtaaaaattattattagctatgcttaagaaaatattaatcctacataccataagctggagaaactagttttcttactgacttaattaattagttacacttttagctgatacttcgcttactctttttatattttttaacaatgctttttctctgttagatttctatttgaagaagttaaacaatatatttgttaaagaaaatgtcctactcagccataaaacacatatgcaatctcagctcaagacaaagtttgttttatttcaaaatttcatttttctctatatgctttttcatacttatcatggtattaatacaatcagtatatcatcaatcataacaccagcattttgacttgcttaaaatatactcattttaataaaaatctatcccctttcattatgtctatattccctgtatccataagtatatctgtgtgcaaactctgtttaatatcctcatgagtgtgaaagaacaaaaagaaatatattgctatttccacttgtctttattaatatgcttcacgtgtctttaagacacttctctcattcaagttaataaacagaccttttctttgtgttctttggaaaatgtaatattacacagactagtctaaatttaaacagaagtctcacccaacatatgtgcacccaccgttaaacagactctgccactgagtggacctctccacttgctgcttcctcctgtatatctagattatccaggtttctccccagaactaaagtactgagactaagccttggggatttagttcagcttaactcctgaggtgcctacttggctctcgatcagtttataggaatgatcatgcatgagttgggtcctttttaggttcaaaatagggagagagtcttttcaagagaaagtctgagatatgggtgaaacataggacaattaaagtatttctaggggggtttcagggctgaccacatctctggggttatactaaaatgtaacagagtttcaggaatacaggattgaggacttgcaccaaaatgtcgtcctctctgctgttattttaactcacacatagacctctttatgccattgcatgctatacttgtcatcctatacctgtctgacacctaaaacaatgaacctcccacaatatgctttgtgccctccaaatggaagttaaactagatgctttcctgtcaatagccaggagtacagaagcacgcatatatgattttcataattgttgtcgagttgttctcctgttatatgcgtagatatttgcatagatatataccactctaaagactacatgtgagaagtcattaaacatcagagtaccacttttacttttgtttttaactctattacttattactcttccctatccattgatggtagtgtgtttaatttcacaaatgttctatattaaaaatgcacacatacctaattttttattaactcattccacacaaacctttggagcatatgctttttgccagctgccattctaggccctggtgatacagaggtgaacaatagcaataaagtcctgcccccactggagcagacattaaacaagggagtgaataacgataattgtgcaccattatttaagatagtgataagttctataaaatgttaagtaagttaaagggacagacagtgagagtaaggggcaggcaagctttatttttgtcaaggtgatgagggaaggcctctttgaagagttgacattagagcaggctcttcaaagaagggagggagtaaaggatctggaagtctgaagaagagtattcttggcagaagatagcaagtgcaaaaccaagctcagtgtcttagaggagcagcaaggccagtgtgtctggaacactgtgagggaagacaaaggtggtagttggttaacaaggaaagaggtcagggaccaggtgatgtaggccttgaaggatggggcgagccttttgaattttattctaagtgagatggaagccactactaggtttcaagtcacttagtgacgatttatatatttaaaagctcattatggttgagaatgatgagaggtagtaaagcatgtgagttcaagcagggctgttgtgtcacaccacttatatttacattccaggtgcttacttccaagctgtgaggtcttgggcaggttacctagccttttcacatttcaagattcttatttctgagatgaagataacagtagtcttttatagggcggttgataggattgaatgagataatgcagggaaagcattgaacagggcaggtacaagtaagcactatattttcacttataattataattattatgattcttattatgaacattttcatcaaaactactttctttaacagctaggggaaggttgaaatactgtgaatattatcatacagcccagtgagattataaatactttgttattttctatcttccaaatatgcttgtatgcttggttatttatcaatgtgtgtgtgtgtgtgtgtgtgtgtgtgtgtctgccttaacatgcaactataatgtttgtgaaaatgttttgttaagtcatgattttgtaaattaaacctatttcaaatgcactagacaagtttgccatttaaacaaaaataatgcttagccaggcacggtggcacacacctgtgatcccagctacaagggatgccaggaggattgcttgagcctgggaggcccaggctacagtgttcgtcccaccgcactccagcctgtgtgaaagagtgataccctgtctcagaaacaaaaacaaaaactttcaatgaatctcttatgagggaaaaactgtcctagaaaatcaaagttatccatctcccagtaaactggctggatttttatgtatccatagctctacatcaaaaagacaaagaaatattttctatttttaattagaatactcaattttaagcaaatctcacaacacaatctgttttgattctttttatatcatttttatttgtttatcaatgcatatttggtacaattgcttagaagatcaagacaaacgaatttttagtacataccgaaggcaacacaggaaattaaatttagcagtgtgcgatgatattgccttttttcagttttcatcataaacaatatttgcatttcttatgcaccatgtagtcctacaggtcatattacataattgcttgactttcagatatttaaatggcagctaactgatgaaattaactagaatgcttatctaaagtttctattttgtgaacactcacttatatttgggggaaggaaattatttttaggtagttattcctaatttagaaagacttgatgaagtcagaataacctaataacagatgcctccgtctgtgtaaatttttagaatgtctaagtagtgtgattttgctttcatgtcaataaaccattgagtctacaaatcagtcaattgctaccctaataatgaaacatttatgtgtcatgcatggacatgagtctaaacttacaaagttctgctttctgcacaagatacctctattttgactggaaagaaatctctatatagatcatttttaaaaattgtgtaagtttgacatcattagataaacagccatagcccaaatttgaatgaaatgctgtgttagacagattttattttctagtaaggttacatatgctcactttttaaaatacattctcactatatatttttttccatcacgtccaagtgatggaatggttttatgtcactcatatcaaaatcttctgctcccctgtttcttttgtctcttaagttatttatcttggggttttctaaaattttatttctttccttcccttccatcctctttcctcccttctttctttcccttcatccatcactattaaagtggactctagagattcaaagattaaaaagatgaaattcctacttaataggaatgctaagcctagtgaaagagaaagacacaaataaatgctctacaatatgataagatctacagtggatatctgtataaaatacaacagccctactatttttccatatggattttctaattacttttattctctttcacctttctggatccaaagcaaaatgtagaatttttgtctgagcagtggcatctatggctctaaaatggaaaggaggagtcctggattcaggctactgacttactctgtgaatttacacataacttcctttgagccacagatttagcattctaccagtcacctgatatttctgagcagccacaatattttaaaactatatttaaatctgaatttggatttagcagaattttattttttccatttctattttctatggtcactaaattgaaattacaaccattgtaaaatttgatatcattaaatatgtaggactttatccagtttcaaagtaaagatgtctctaatgtaattaattgttattttcactgatgagactgaaatacaatcagtctgtattgtgtgtgcgtatgtatcagtggtaagaggctatgattagacaacttttaaaagattattttattgacacgtacgtaaatttttcctacatatgtgattataaataaatgtgaatttgatttaatatctaaagaacatgatataacaaacaactgacttttctggcacagttttgttggcttacaatatttaaattacataaaacatgaaagaattctgaatttaaattccttgaaacataatgtgtgccatggaatgaggtagacttcaagtcaaatccactcacagttggatcctgagcctgccatttactagccatgtggctcaggcaacttacttaaccttccaattgttgattcttctctaaactcagaataatgccttcctcagagtgactttataagattaaatgaaggttcttctgcatcacaactagttcagtaccttcaactgggtgaatgtgttcaatgtctcatagcatttatttatttatttatttatttatttacttacttatttttattatactttaagttctaggatacatgtgcagaatgtgcaggtttgttacataggtatacgtgtgccatggtggtttgctgcacccatcaaccagtcatctacattacatatttctcctaatgctatccctcccctagccccctaccccccgacaggccccagtgtgtgatgttcccctccctgtttacactgttggtgggagtgtaaattagttcaaccattgtggaatgtagtgtggcaactcctcaaggatctagaaccagaaatactgtttgactcagcaatcccattactggacatatacccaaaggattataaataattctacaataaagacacatgcacacgtatgtttattgcagcactgttcacaatagcaaagacttaggacccaaatgcccatcaacgatagactggataaagaaaatgtggcacagggggaggagccaagatggccgaataggaacagctccggtctacagctcccagcgtgagcaacgcagaagacgggtgatttctgcatttccatctgaggtagcaggttcatctcactagggagtgccagacagtgggtgcaggtcagtgggtgcagcacgcggtgcacgagccgaagcagggcgaggcattgcctcactcaggaagtgcaaggggtcaaggagttccctttcctggtcaaggaaaggggtgacagacggcacctggaaaatcaggtcactcccacccgcatactgtgcttttctgacgggcttaggaaacggtgcaccaggagaattatatcccgcacctggctcagagggtcctacgcccacggagtctcgctgattgctagcacagcagtctgagatcaaactgcaaggtggcagcgaggctgagggaggggcgcccgccattgcccaggcttgcttaggtaaacaaagcagccgggaagctccaactggctggagcccaccacagctcaaggaggcctgcctgcctctgtaggctccacctctgggggcagggcacagacaaacaaaaagacagcagtaacctctgcagacttaaatgtccctgtctgacagctttgaagagagcagtggttctcccagcacgcagctggagatctgagaacaggcagactgcctcctcaagtgggtccctgacccctgactcccgagcagcctaactgggaggcaccccccagtaggggcagactgacacctcacacggccgggtactcctctgagacaaaacttccagaggaacaatcagacagcagcattcgcggttcatgaaaatccacggttctgcagacaccgctgctgatacccaggcaaacagggtctggagtggacctctagcaaagtccaacagacctgcagctgagggtcctgtctgttaaaaggaaaactaacaaacagaaaggacatccacaccaaaaacccatctgtacatcaccatcatcaaagaccaaaagtagataaaaccacaaagatggggaaaaaacagagcagaaaaactggaaactctaaaaagcagagtgcctctcctccaaaggaacgcagttcctcaccagcaacggaacaaagctggacatagaattactttgacgagttgagagaagaaggctgcagacgatcaaactactccgagctacaggaggaaattcaaaccaaaggcaaagaagttgaaaactttgaaaaaaatttagacaaatgtataactagaataaccaatacagagaagtgcttaaaggagctgatggagctgaaagccaacgctcgagaactacgtgaagaatgcagaagcctcaagaaccaatgcgatcaactggaagaaagggtatcactgatggaagatgaaatgaatgaaatgaagtgagaagggaagtttagagaaaaaagaataaaaagaaacgaacaaagcctccaagaaatatgggactatgtgaaaagaccaaatctgcgtctgattggtgtacctgacagtgacggggagaatggaaccaagttagaaaacattctgcaggatattatccaggagaacttccccaatctagcaaggcaggccaacgttcagattcaggaaatacagagaacgccacaaagatactcctcgagaagagcaactccgagacacataattgtcagattcaccaaagttgaaatgaaggaaaaagtgttaagggcagccagagagaaaggtcgggttacccacaaagggaagcccatcagactaacggcggatctctcggcagaaactctacaagccagaagagagtgggagccaatattcaacattcttaaagaaaagaattttcaacccagaatttcatatccagccaaactaagcttcataagtgaaggagaaataaaatacttcacagacaagcaaatgctgagagattttgtcaccaccaggcctgccctgaaagagctcctgaaggaagcactaaacatggaaaggaaaaaccggtaccagccactgcaaaatcatgccaaaatgtaaagaccatcgagactaggaaggaactgcatgaactactgagcaaaataaccagctaacatcatattgacaggatcaaattcacacataacaatattaactttaaatgtaaaaggactaaatatcccaattaaaagacacagactggcaaatgggataaagaatcaagacccatcagtgtgctgtattcaggaaacccatctcacgtgcagagacacacataggctcaaaataaaaggattgaggaagatctaccaagcaaatggaaaacaaaaaaaggcaggggttgcaatcctagtctctgataaaacagactttaaaccaacaaagatcaaaagagacaaagaaggctattacataatggtaaatggatcaattcaacaagaagagctaactatcctaaatatatatgcacccaatacaggagcacccagattcataaagcaagtcctgagtgacctacaaagagacttagactcccacacaataataatgggagactttaacaccccactgttaacattagacagatcaacgagacagaaaattaacaaggatacccaggaattgaactcagctctgcaccaagcggacctaatagacatctacagaactctccaccccaaatcaatagaatatacatttttttcagcaccgcaccacacctattccaaaattgaccacatactgggaagtaaagctctcctcagcaaattaaaagaacagaagttataacaaactgtctctcagaccacagtgcaatcaaactagaactcaggattaagaaactcactcaaaaccgctcaactacatggaaactgaacaacctgctcctgaatgactactgggtacataacgaaatgaaggcagaaataaagatgttctttgaaaccaacgagaacaaagacacaacataccagaatctctgggacacattcaaagcagtgtgtagagggaaatttatagcactaaatgcccataagagaaagcaggaaagatccaaaattgacaccctaacatcacaattaaaagaactagaaaagcaagagcaaacacattcaaaagctagcagaaggcaagaaataactaaaatcagagcagaactgaaggaaatagagacaaaaaaaatccttcaaaaaattaatgaatccagaacctggtttttagaaaggatcaacaaaattgatagaccactagcaagactaataaagaaaaaaagagagaagaatcaaatagacgcaataaaaaatgataaaggggatatcaccactgatcccacagaaatacaaactaccatcagagaatactaccaacacctctatgcaaataaactagaaaatctagaagaaatggataaatttctcgacacatacactctcccaagactaaaccaggaagaagttgaatctctgaatagaccagtaacaggctctgaaattgtggcaataatcaatagcttaccaaccaaaaagagtccaggaccagatggattcacagccgaattctaccagaggtacaaggaggaactggtagcattccttctgaaactattccaatcaatagaaaaagagggaatcctccctaactcattttgaggccagcatcatcctgatatcaaagcctggcagagacacaaccaaaaaagagaattttagaccaatatccttgatgaacattgatgcaaaaatcctcaataaaatactggcaaactgaatccagcagcacatcaaaaagcttatccaccatgatcaagtggtcttcatccctgggatgcaaggctggttcaatatatgtaaatcaataaatgtaatccagcatataaacagaaccaaagacaaaagcacatgattatttcaatagatgcagaaaaggcccttgaaaaaattcaacagcccttcaggctataaactctcaataaattaggtattgatgggacgtatctcaaaataataagagctatctatgacaaacccacagccaatatcatactgaatgggcaaaaactggaagcattccctttgaaaactggcacaagacagggatgccctctctcaccactcctattcaacatagtgttggaagttctggccagggcaatcaggcaggagaaggaaataaagggtattcaattaggaaaagaggaagccaaattgtccctgtttgcagacgacgtgattgtatatctagaaaaccccattgtctcagcccaaaatctccttaagctgataagcaacttcagcaaagtctcaggatatacaatcaatgtacaaaaatcacaagcattcttatacaccaataacagacaaacagagagccaaatcatgagtgaactaccattcacaattgcttcaaagagaataaaatacctaggaatccagcttacaagggacgtgaaggacctcttcaaggagaactacaaaccactgctcaatgaaataaaagaggacacaaacaaatggaagaacattccatgctcatgggtgggaagaatcaatatcatgaaaatggccatactgcccaaggtaatttatagattcagtgccatccccatcaagctaccaatgactttcttcacagacttggaaaaaactactttaaagttcatgtggaaccaaaaaagagcctgcatcgccaagtcaatcctaagccaaaagaacaaagctggaggcatcacgctacctgacttcaaactatactacaaggctacagtaaccaaaacagcatggtactggtaccaaaacagagatatagaccaatggaacagaacagagccctcagaaataacgccgcatatctacaactatctgatctttgacaaacctgagaaaaacaagcaatgaggaaaggtttccctatttaataaatggtgctgggaaaactggctagccatatgtagaaagctgaaactggatcccttccttacaccttatacaaaaattaattcaagatggattaaagacttaaatgttagacctaaaaccataaaaaccctagaagaaaacctaggcattaccattcaggacataggcatgggcaaggacttcatgtctaaaacaccaaaagcaatggcaacaaaagccaaaattgacaaatgagatctaattaaactaaagagtttctgcacagcaaaagaaactaccatcagagtgaacaggcaaaatgggagaaaatttttgcaaccttctcatctgacaaagggctaatatccagaatctacaatgaactcaaacaaatttacaagaaaaaaacaaacaacctcatcaaaaagtgggcaaaggatatgaacagacacttctgaaaagaagacatttatgcagccaaaagacacatgaaaaaatgctcatcatcactggccatcagagaaatgcaaatcaaaaccacaatgagataccatctcacaccagttagaatggcaatcattaaaaagtcaggaaacaacagatgctggagagcatgtggagaaataggaacacttttacactgttggtgggactgtaaactagttcaaccattgtggaagtcagtgtggtgattcctcagggatctagaactagaaataccatttgacccagccatcccattactgggtatatacccaaaggagtataaatcatgctgctataaagacacatgcacacatatgtttattgcagcactactcacaatagcaaagacttggaaccaagccaaatgtccaacaatgatagactggattaagaaaatgtggcacatatacaccatggaatactacgcagccataaaaaatgatgagttcatgtcctttgtagggacatggatgaaattggaaatcaccattctcagtaaactatcgcaaggacaaaaaccgaaacaccacatgttctcactcatagatgggaattgaacaatgagaacacatggacacaggaaggggaacatcacactctggggactgttgtggggtggggggatgggggagggatagcattaggagatatagctaatgctaaatgacgagttaatgggtgcagcacaccagcatggcacatgtatacatatgtaactaacctgaacattgtgcacaggtaccctaaatcttaaagtataataataataaaaaaaagaaaaaaaaaaaagaaaatgtggcacatatacaccatggaatactttgcagccataaaaaaggatgagttcatgtcgtttgcagggacatggatgaagctggaaaccttcattctcagcaaactaacacaacaacagaaaaccaaacactgtatgttcttactcataagagggagttgaacaataatatttttattatttaaaatcattgtgtccatgaagctgtaattcccaattaagtattacttcccttctcttaggaaactatcagtgggatttgggtgtgtgaaggagaatttcccatctattggctaagcaagccgagttatttaaagggagatctgatgcactctggggggataggccagcctccatcggttagtcaggagtgagcagaaaggctgtcgggagctgagaattcacaagcctgctctcagatgcgcgcctactggtaggaagtctgaaacaatgtcctggaaagaaatttggtgcaaatccagttttgcatatttactaagtctgacacctcagagtttttaaagaggttttattagctgtatatataagtggtcttcccctatcgtgtatttttcttaagagattaaaaatgatggcaggaagtgaatcaccctggaacttcactattccttctgaattcaggactgtcccagtcataactgatgtttttaggtcggctttgcagattgaaaccactttacaatgaagtccttttgaaacttcagaaattcctcttggacaaactctgaaagtgaatttttctctgtgtcaaataacaggagaaaaagtctctgcgttattgtaggagaagaagaggaatagccacagacctgcatacatatttattaaagtgctgatgacccctcatatgcattttttcagcagtctaataatacaagacttaaaatgcttggtacttagcccccaacacataactttgttcttagcattttcagcaaaacttagaagagctacatggccaattctgaagagtcttagtttttcttcaatgaagtgctttcagggatctaaacataaattgctgccacacagagtagtgaagggaattataaagcatttacatttcaccattcatgactgttacgcctctctcagaatagacagttgggaaatgattgaatgaaacaagaaatggccaagccacaccacgtcctccgcttgtgtgtttcttgtatttaaggattaaggcctcctaccctgtgacatcattgttgccactacaaacagaaccatctgccatcgagtggggaagccagtcattccctaatgtgcaaaaatacttggttgaactcctgaaacttatttggtagatcaaaagctgcactgctgtggaatgcaataaactccatctgtttgaagtattttcagcaatattgcactacttgggagaaccagggtcccattattctctaaaataagacttttattcccggtaaaattcccagtggggatctttattgccttattgaacagttggcatcatttttaaaaaggactctttttttcccttcattcgttcttatgccattatttatgtctcagataagccagggtgttaacggttatatcacggcaactcacaatgccaagaaacttctcttcactattttatcagtgtctttaaatttatgttttctttattaaatatgatggtccctggattaggcatttccctagagtcacgaattggcattgttttccagaaaacacactctcctgggatcattacctttccgctctccagaaaatatctgtatatattatttcccccttcacatcctcaacttaaaactaaatgccaaatctacagccagacctgtgactccgccctgttctaggtctccacagatgcacacactttactcacagctctcttccaccctgtgtctcagcgagaaattccttctgggccccttgtgagaagagttcagatctgttcccggcccatatcccatcacgtctcccccacaggatctgaccttgtgaggacttgggctgccccgggagtaatgaatcaccgtcttatttttttaggccatatgtgagttaaattgtttgatataaatcatactcttgcagctcagggttgaaacaggagagccatttgccctgccgcctgctgctggcggttctgtgtctttacccagagtgtcgcttttagaaatgactacatttttgtgactaacctttccagacccatttcttgagtgtggactcatgtttgttttggcagcatccccactatacagtccttgcttcccatgccaacctaaggcaaaactcataatttacaaaataaaggaatggtccagatggaggtcgtaacttggtctgcttaccctgtctccctagaaccacccactcctttcctctgctctcttttccttctttttttttttttccaccttctttgaaaccaaggatgcagtgtttgtttaaaaatgcactggctgatgaaattttccactgcttggcatgttggaggaggagctgtcaggaaagggcaagccggcacacaaaatgctctgcctttcacgctaacagttcacttattactgattcaaaccaattctttctggccacgttcccataccccaggtattccaaatagaaagaaagggggcaactgttctaagtttctgctgttataaatgtatgatttcatgtaacctatgtggattctttgacttgtccatgagctctggatgctgtatgtgtatgtatgagatgtcagtgaatagttaaatcatttgttttgatttcactctagcaagaaaaacctcattttattttttttaatatccagagaaagtagaagaaaaaaccctcataattttaaaataaatttctgtttaacatatttctctttcttttccttgcggctacatgcataggggaacaacaaagtaagttatttgtcctcttgcagctcttctgtccccccagcccctgctccgctcctgcatgtcttgacaagagtgttcctgtgcatgctggaatgactgtcatctgttacagtgcacgaattatatggggtgtgcaaatttgggggaaaatgtgcatttgcactaccataatggctgttccgttttgacttttgggaagggaaacattctatccttcagggtctaatggctagttcagagaggttgacattataaggaaagagctcccacactaaaagaaaagattttgaagatttaataatgaggacccttctgcagaaggggtacagcaataggatggaattcagtgcagctgaagtttttgactaaaaatcaaacctcttatgttaatgtgcagttacaaaaaccccaaactggagtcttaaatagcagtatggctggctttgttgacgaaactgaactagatcagtgttctggctttgaaggtgccttaaaatggatggaggagggtggggtcaacatttcacttggcttctgtgcccttgatgtcttccagctggatggaagcagaagggtgtggggaatgcagggggtggccaaaatgtgtatgatagctttgtgaaaccaggcaacacacaggaatggtggaaattattttaatgttgttgttataatagatcaatgagcaatttaatagttcatggggttgctagtttgtttaaattttaattcaacttttccaaaagattagaactatttctcacttatattagaaatgtaatagtaatgtagtttgagaagatggtcttacgtttagttgggcgatttgttttcttattttttctatggagatacattagtgcttcaccctaccaggtggcccacttaaaacgggcctcattgaatacaataagaattgaaaagaatctgttatataagagttggccggcatattcaaaccagctggaattcgtcaaaatttctgttcataagccatacatatagaatgtaaaacaaatgtgggaaatcttttgcagtttaatctgatggaatgtgctattatggaataagttgacatacatggttggtattgaaaatgtgtcactttataaatttatatcttgatataactgcttataacccaagtaataatatataataaagtattaccagaaaagcacaagacaggcatttgtgaaggagtaaagaggtgaactcagtcgacttatagtatgatttttaaaaacagcaggtaacttttgaaattgattaaagatttcttccacaaagtaatggctaatatttataactaattccaccactctttgaaaagacatttggaaaaaatataaaaaccaatatttttagttcttataccataaaatatacttcaattattgaatagtacgtatgtcgaatcctggtcacttgcattgcactgagtctctgtatgaaatttcttgtactgcatttcttatttgcaagcaaaacaaaacaaaacaaaactttaaaaagtaccctggactaattgtgagtgtgctaacagggagcctgtgcatgctgaagaccagggagccagctgctgacattttgggggaggtgctaactctcagaccactcaagaagcatttaggatttgtctctttcactagtggattcaccgatgagttaagaacatttgtaaaattcactccccacacacacaccaagaagaaacccacttctccttaccagaagccatccatttgttgtgtcatatttgattaagttcttctggatccaaaaaatattcagtttaatacattttactgattttcaagtcactaaatacaatgagaaaattcaaaaatttaaaattacggctcattaagggtttccctaggatgatgcagaaggctcttcagggtctccagctgccctcggtcaccaactgtatctgaacgcttgcgcatgtgctatgaggacagctttgggtgctccttagagggcgagtgttagttgaagagtatcaaagatgcaagtacttactgttttgatttcgaattaaggagtgagcactttggaggtgctagtatttattgccccatgccttatttttaattgtttgttatgaataagtgatagtttgtggaaaatataatgcttatactttttaaatatgatcattatactgaccatagactctggcataaaaaaaaagcctcctcaaatcacaaacagcacatctgcatgttattttcctgtagcttagaatttcagtataaatggaaaatactggaatacaagctgtgctgtctccggagtatagatctggattcttcaaaaggagaatatgagattccttttttcctcccatgctggaatgcttgttctgagttgtccccaaggcaacatacctgaattgttgcctgccatatacgtgagccagctgtaaagtgtgactcattttagacttgcaaaggcttattgtttatctagtgcatggcattttattatatatgctattaaccagactctagagcaaatgaagtctgcccaaattaatgtttccttagatgagcaggacagattcatctttccacatacattaagagtagtgcacacacatgtgcacatatacatataacctggggtatatggaacaatcctgctatttgttttctcaaagacagccaaattgatctgcttcatccatctttagactatatttaaagtttgggagctaatcctctaaactccaagaaaactaacttctacaatagatgtgcatttagattcacattatgaatgcatgacggaacaaaacatcaaggttcacattcttcctgcacaatcatatgtatgttgttatttctccttgaaaagcacattttccttttgtgaggagatcacagttgctcaggaaaaattttccttccaggcctgttacttatttttccctttgaaaatgttttcgtgttggcatagtgatttcctaaattgctcagggtagagtctatctcctcctaagatgggtttccctggaccacagattccaagtcaatgtcttcattagaaagaccagaatccaggacaccctgagtcagttctgggaatgtgaacaaatatgtacagaaacagggaggttattttgttttttaaacttgtttcttgagtacaaatgtaaatcagaatgttattttcagaatggaggccttaggtaaaaaattaacctccatgttgtgtcttagacacaagccatttgatttcctttttgaatgtgatggcttctcttggtggacaattttagaaatttcatagacttttaatttaattttttattaaatacttgacgtttcagttaaatatttttgatattaaattaggcaagttaaaggtagagaaaatcttaacatgtaaggaatataaatatatcaaaagccctaaaagtttttaacgatgttggtatagatacacaaatgaaaactaaaatgaatcctagattcagaaatcaatgcttcaaaaagttttaggttacaaggaaaagccacatgtaagctcgtgccttgtgaatcctttgttgcttttaaaaaagaaatttataatcacttaacttcagtattgttaaactaaaggactcttatattttcccccacagaatttaaggctgactgtattgcttagagagaaggatcattttaaaggagaaatagaacagaaacatgctaaaacagaattttaaaattgctaattaaattctagttaggttaaaagcaaaaattttatacatattggagggccttgatatttaagaaaagaagaatgaaaggaaaattagatgaataactgtttttacaacatttaagaaacactttgtctagtgatttcctaacacgttcagcaaggccagtggacaaggtcagccttcattcgtgggaaaagtggttatcactgggagtgattattttggtgatccattggattctagcactcatttgcaaagataaaatttaccaagtcaaatggcaccaaagtatatatattgaagagcaaagatattaaatccatattaattagttatgcctctttacaccaagccctcaactcctaaattattgtccttggtcgtatgtgagagaaagtagatagccactgaaaactcatcctcacaatgtgaaaatgtctttctgatgatgcgtgttataatcatggtgaatgaaaggagcagagagtacagtgtcataatgtacattttctttgtataatattaaatgcatgaccaaaagtcagaacactctaagcaatttaggtatggtcagctcaattattttatttcaataatgtgtgtgctttccctgattttcttagaaaacttaagccaatacatgccctggggtctaaggaacaccgtcccccaccacctggttgactaaatttatgcataacccaataaggacatcattagagttaaaagaaaggatgaaaattccctagcctcaaagtgttattttagttccatgtgaatataaaaaaaaattgtctgtcaatcattgcatcaccagtaaacctttgcttctgtttttggcaaatcagccttaaaagagcattgttaaagccttatttttgaatcccctcactttaatagtaaactgttgggagaaggaacagtttaattgagggtagaaaacttctagaagcaaattggaatctatattatgttcccaaatttattgatcatgctaaatagactctatagagaagcaagaattgatctgctgctgcttagaaagcttatagtagattataatacagggatttcttaagggtcattagggcttgtttatatatttttattttctctgttgggtcgaaaatgaagtgacctctctagttaataggaaataatgtttaggacttcatagctgtttcaacatatttgctctcacatattgtaatgtacacatcccaatattgtagacatctcctttctgcatgcttcatgatatttttaatggaactggtttaacactgctccaaaacaagagtcgttcatgcctgttttgaaagcataatatctggataatgaaaatgtggcacatatacaccatggaatactatgcagccataaaaaagaatgagatcatgtccttcacagcaacatggatggagctggaggccgttattctaagtgaattaatgcagtaacagaaaaccaaataccaaataccaaataccacaggttctcacttgtaagtgggagctgaacattaagatcacatggacacaaagaagggagcaagagacaccggggcctacttgagagtggagtgtgagaggagggcgaggatcaaaaaatttcctatcaggtactatggttattacctgggtgatgaaataatctgcacaccaaaccctgtgtcatgcaattaacctatataacaaacctgcatatctaccccctgagcctaaaataaaagttaaacaaaaagaaaacattttatcatgaagtatgagtttattcatttatttatttatttacttttagagacagggtctcgctaagtttcccaggctggtcttggactcctgggctcaagcaatcctcctgcctcagcctcccaaagtcctgggattacaggtgtgacccatcatgcctggctgattttaaaagttaccttgtgataagcattgttttgaaatttaaacccttacagagtatttctattaaaaattaagaatttgtgtttttttttgtttttaatgttaatgtggttatggtactgtatggtaaaatcattcagaatcattgcagtagggagggttttaaagccttctgtctatctttggcagatcaactgagcaaaaaccaagataaaaaaggatgtgaatggtataaaaaataagtgagattcaaaagatatatatgtgcatatttaaaggatatatgaatattgaatgtctggtaaaatacagaaaactagagctgtatagaaaaatttaaatgtaaaaacctatctatttacaagtgaaaaaatacattccaaaatagatccaatggaaattagtatttaacttacagactatttggaatataataatagtgaaaacactatacaggctacaaccaatactatacaaagagaaaaattaatttgaaaatgaattatttgtttaatggaagtcaataaaattaggagattggaaagagagcaactgcaacctgatgaaagaaagaaattcattaagtaaaaattaatgaattagaaaatagcaaaagaaaaacaagaaagcttaaactacatacaaatttaaagctttcgtatgagacagtagagttaaaaggcaaaagacaaacaagtaaaatacctgaagcatatatgacaaaggattaaatattctcaaaatagaattatccctattcagtttattaaaaaagctaaaacaaaaaaagcaaaacaaagcaaagaacactacctactaggaaaaaaggaagggggccaaatcaatagagcatttagaagccctcctagcccctgcaaaaggactaattaatatatgacaaaaagtttcaatttcactaggaaccaagaagtgtaaattaaaacagccagccagacatcatgattgggctttcagattaggagatatgagaaagaaggtcgtgtgataggtggtaacgaggaagccgtcctccttgtgtaccacacatgttgccgactctgcatgtagcctccctggaggccagcttgagactctgcattaaatgccttggttaggcgcaaaccttatggctcagcaattccactcttcaaagtttatttttatcaaatgattccataattgtgcaaagaaatttgttcaaagatgattttgaaacattgttcataattaccaatgttttaaaacagcatcaatatccatcatagaaaattggttgaatagagtatggtatattgattcaacaaaatgctatgaagcaaagcatttttatctttaaaaatataaagatatatatatagaaattttcatgataaattaacaaaacattgtgcatgccataggtagcataattccattttacttaaaaaattttacataggatgagatatatacatatatgtttgcacatagaaactacctattgtgtactatgctcactaccagggtacaaaatacccatgtaacaaacctgcatatgtaccccatgtatctaaaataaagttgaaattttaaaaataaagaaattctggtacagaatttacaccaaaattttaacagcatgagcaatattaatttgtggtcctgtgttgttttctcatttttatgtgataaccatcctttgtgtaactttcaaaaaaaggttttgaaatacacaaaaaaatgaagaggaagatacttaaatagaggatggtgagaaagaaagaaaagtataaaatggtgaaaacagaatatctaggaggagaaatatgtaccataaaagaaatagattaaactttacaagaaaatagattaacttttatatgaatgtcaaagatacatgtggaaattaactttaaagtggaaactaagcatctgagaccctacaagcttgacataattatgtaatcatgtttattatgattatttttgttgtgattatacagattttgttacctcttttccgtttactctgcctgtgcaaatatgttattttcctcactgaattgcatattgttgaaggactatattaggagtctccaaatgctcacattccctcattcattgcctattgctttcaatagtgtctttgtttcaaatgctcaaattccatgagatgaagcctccccatcttcctggaccaatcgttcttccttaaattccagtttcctacctgtcagcgctgttgactactatgactgtgttgtgtgtaatatacaaataatgtatactgtctaaggattatcagtgagccatttcatgacctaatttctggctcttgatttttctgctgttttaaaaatctcattgaggtttaaagataacatataatattaggctagcagaataattatgtaaaatttaaatgtaaaagtcaactcatttgccttgaacccatttatttatataattaaatgtatactcttaatgttgaaaaagcatgatgacaattgaaataccaagatcagaattagagtcccactaagaaatgctccctttaggaaaaacaattatttcttttgatttcagccatgagcagcacttaatatacgtttgctaggcaccccaccagacacctccagtgaaacaagagcagaaaggcttagaggtataaagtgtctggttcctatgtagtatatttaagcacaaacagattaaggctgatggcagtaaaagccagtgacttaatctgactctaaagaataaacagagtttagaaagaaattaaaattgaagagaacattttgaatacatatgacagaaaaaagttactattttactactgtcaaagtttgatgagttcttacaaattaataaggaaagaaaaaacagggaagtggtgtttaggtggaaagtcagaaggctgctgtgtcagttcaggggagagatgatgatggcttgggttagggtcacagcagtagaaatagtgagaagcagttggattcagggtatattttgtagagccaatcttttgaattactgatggatttgatatgaaaaaatgagagaaagggcaaaatcaaaaaaaaagcttattgggtcttagacaatgggtacatgttagtgccatttaataatgtaaggaaaggagaaagtggaatggaacatttagttttaaccatgctaaagtttgagatgcctagtacacatgagtttctagtcaggatagagtaagttacaatgctgtaacaaacaactcctcaaatctcagtagcttcaaactacaagatttatttcttgctcaagctgcatattcatctgaacattcatcatcaagttggctggggctcctctttttttacttttttctggagatggagtctcactctgtcactgaggctggagtgcagaagtgtgatttcagctcactgcaacctctgccttctgaggtaaagcaattctcctgccccagcatcctgagtagctgggactacaggtgcatgctgccacatccggctaatgttttgtattttagtacagatggggtttcactctgttctccaggctggtctcgaactcctgagctcaggcaatcgcccaccttagcctcccaaagtgctaggattataggcatgagccaccatgcccggccagctggggcttttctctttgttattctcactgcaggacccaggccagtaggattattgcctatcactatggcagacaaaatgaatgagtagagaatcacacactggctattaatgcttcacactgaaagtaacatgttatttccacactcctttcattgtctaaggcaagccacatggttacacctaaattcaaatggacaggaagtacaatcctgctaagtgccttgaaggagaaccagatatttggatgactctcactatccaaatggcgacatcttctaggcagttacatatgtaaatctagagttcagggaagatgtttgcagacagagatttagaagttgttacgtatttaaaatcttggcacctaggaagaaagtgcagaaaccaaaaatagagagctgaggacaaaatatctatcctttaaaaatatattagaagaggagaaaccagcaaaatagactgaagaagaacaggagagtgtgtgtatgtgtggtgtgtacaagtgcttctgtatttatatgagcatataaacaagcataaaaatgggtttgaagaattagggattcttgtgaattttttagacattcatttgttaatgcgttcatgtattattaacttgaaatctaataagttaagacaaaactgttacactaaaagtgtttgtgggaaggtggtggcggggagcagtaacatttaagtagactgaacaagtgagtataaggcacttgtaggaagctagaagaccaggtgagcatatgcctagacccagttagtaatgagtataattgcatcgaagccgtacacctgcatattaaaattaagcaatctgaatagatggagcaggcagacaaatatcccagaacaaaacccaaaataagtcacttatttaggaccctattttttaaagaaactataagcaaagagaactagcacattttaacttaaaactgtagttgtttctaaagcattttcattttgtttatcatgcctcaacttgatgcatattatcttaatccagaggtaaaaaggaattttttaaattattggaatatgcagaatctagtaaacaaagttgtaaaaagaaaacaataatatttaaataagggttcagaaaatatattcagttgcatcccaactaactgagttatccctaaaatagaaaaggctaatattatttagggatatctaattgtgaaacaaaaggatattaaagaccagctttgcataatgacaacacacattcttcaacataaaatattattgactatgaattgaagaaaagttctgattgagacattttaattttcttctttgacgtaattagccattagtctcataaattttctcattttatatcacaagggctttaaagagagttggtgacacttctagggattaggtcaaaaataaaatcttaactaaagatcaaagagcaaaatagagccttaagaaaggatcagcttttcgaaatagttctgtcaccacaattaatcccccaattaagaaaccgaaaaaatacacagattcaccttgacttataatgcagttacttcccaacaaacccatcataaataggagagtgtactgaatggataccacttttatactatcttaaagtcaaaaaatttaagtggagccatcataaattggagactgtctatatattgtttccacatagaccagtgattctcaaccaggggtgatttttctctccagggaacttttggtaatgtctgaagacatttttgattgtcagaatgggaagttacaactggcatttagtgggttgaagccagaggtgccgctgaacatcctatgatgcacaggacatcctctacaacaaagaattatcccatcaaatgtgtcaatagtgtcaaaaatgataaaccctgatctcacttaaaataagtatacaagatactcctatacccaaacagcctatgaagatttggacctgtgtccttcattaatggagcccaattcacttaggattggatgaagaaggggaatctgttcagcctgcagactctggctacatgcagtccacactttccaccatgtttcagcagtaactgcttcatatgaaaaatatattccctgccctttgatttgctggtttgccttaggaagtatgataataaccaaacagattttcatacttgggcttgcctacttggtcaaggactgtgcatgttacaaagaattgccttaacccacacttttttgtgaacatatgtctttcactaaataaaaaaaaactaatttttataaatttgggtaacttttatgtgcttcctctaaaagcctgtttcaaaattggaattccacaaaaacagaaaaaagtaaaatatttctgtatttgagcaagagaacaagatacaaaaatagactcagtaaggaacagttaaaatctgagtctttatcaggaaaaacttttctaattttccaaccttaaaatcataattctttcctttccatgtggcccaataacttgactcatggattgtcaagcagaaacttttttgaccagggtatgcaatgaattgtctgccaatcaagatttttttaaagtcacttttatacagataagacagtcgaagctaaacccaaagattcagctatccacatcaatttgctcagcccatttagaggtagagtttttcggggataaaggcataaacttttacactttgattttcttcaaatatgacaaaattactgaaatcaatgatagaagccaagtcttatgaaagctattaaaaattttacatttccaattcatgtgaagtgctgagagggttataattatgatgaattatagaagtataaaaaagcataaaatgtataatattatttatagaatacaagacacatgctttcatatgttcattgcagcattattcacaaatagaaagaagatatggaatcaacctaggtgcctatcaatggcataccacattttctttgtccatatatgccatggaataccatgtggccataaaaaagagtgacatcatgtcctttgcagcaacatggatgcagctggaggctatcatcctaatcaaattaacacagaaacagaaaaccaaataccacatgttctcacttataagtgggagctaaacactgagtacacatggatatacagaagacaacagtagacactggggactactggataggggagggaaagaggggacgtggactgaaaaattactttttgggtactatgctcagtacctgggtgacaggatcatttggaccccaaacctcagcatcacataatatactcatgtaacaaacctgcacgtttaccccctgaatccaaaataaaagttgaagtcaaaaagtcaaaaaaagaagggaaagagaatacaaatatcacatctgagagtggtaaacatccacattttagcttgaatttagcaatgtctaaagacatatttgattgtcacagccgggttgggggtgctactatctagtgggtataggccagagatgctgctaaacaccctataaggcacaggacagccccccacacaaagaatgatccgtctaaaatgtcagtagtactgctgttgagaatctccattttagagagaaagagcatgaagcttagcaaagttagcaaactggccaaaggtcacacatctaataagtgaacgcatcaggatttgattaaacccagggttaagtctagcgttaatgcactttctaatgtttatactcaatttcaacctaatttattattgtatacaaatttagaataaacatctttatgcataatttctcatctacatttctgattatttccttagggtagatttatagaagagaaaagtgtcacaggaaatacacaattaaaggttttctataattataatttatatatataaattttataatttatatattacatttttaaaaattattactacaaattataaagttttgattcatgtcatcagtttactttccttaaatctagagctggttcacattcctgatatcttacctaatcacagcctacaatgttttcttttaccttcttatttaatccttggcagtttgatcgtgtctttacctttaaaaaaaaaaaaaaaagtccctcctctcagatagtcttctttaactgcaactgcacacctattgactctaattagagggataagggaatgcagagttttaaagtgccagtcagagctcaaatcccagctctgctgctaactagttgggtgactttgtgcaagtgactctgatcctctctcctcattcattaaatggagcttgatgacaatctacctcacgaggactaaatgagttaatatttgtgaaatatgtagaatagtgcaaggaacaaacttaattctcaaaatgtattggctatcttccaatgtatcggctatcattattttttgtacttgcatgatgttttcatctttgtcaaagtgccttctgtgattctggaaccaatagtttttctgactcccaatgttatcctcattctccaaatatcaccccttttccaagcttaccatttaccaaggactttactatttaataaggccctgataggcatcattagggctacctattgctgagttatttatggcctggcttttacattcagaatttgtttgtggcctggcatcttattccagtcttccctaaacactgtattttcatataccctactactaaaccagttccacagagattacagattacacatctcagtcgttctctgctgttatattttcttagatgaacattctctatagcagtgcttcccaaagtatgctcagactatttaaaaagaagagaagaagattccattatccaaaacatttaagttacattgtgttctgcatctcccttctggtgatacacaaagtatattagcattttaaagtatttgagaaaaacagggataaagaaacatgtaaaagtttttaacaccgtaattcctgaatttatttgatcaaataacacactttttaagaaaatcacacctgtcaccatcttgtagaatagtatcaatgttcagttgggaacactgttgaagaatagggaagagaccatgagtgtccactagctcaagttttctcaaagtgggccatctgccttgcatcagacatagccaagttgctaattaaaaatgcaaactcctgggctaatcccaagtcttctgaattggaatatctgggaatatggcttgggagtattcattttattttattttattttattttatttttattttattttattttattttattttattttattttattttattttattttattttattattttgagacagagtctggcttttgtcccctaggctggagtgcaatggtgcaatcttggctcactgcaacctccacctcccaggttcaagcgattctcatgcctcagcctcccaagtagctgggaccacaggcgcccgccaccaagcccggctgatttttgtatttttagtagagacggggtttcatcatgttggccaggctggtctcgaactcctgacctggtgatccacctgcctcagcctcccaaagtgctgggattacaggcgtgagccactgcaccccgcctgggagtattcattttaaacaaactgccagagtaattttgataacctctaaagttttgaaattactgtgctaggtactaacagcagccagagtgtaaattacaaaagctatgactattttccttccgttaccattgaggagaatttttaaacccatagcctttgattttactgtgaagcacattgatgtaatagtgagaatcatgccctaagtctgggtttaccagaaattcagctttcgaatcacatccttcccaagtccctgtcagctgtgagcaatagcaaatcatttttccagtagcttaggagcctgtgaatggattctgttcacagctttaacactgatggtggggagtcattccatttcctcattgaaaacgactgttggcaatccccaggctggaaggatgatatagagaagcctagtgcatttctctgtggcacaggatcagagcagccacagcccaccaggtgcgccctgagagctcatattaactcactcttttctgtatatttgtttgttcaaagaagtcattaccatatctctttgtacttttctgctaagtagctctgaaaactttcagggagtttttcagatgaacctaagtgtataatcaatccttcattatggttttaaatccagaatgaaagtgcatctgaacttgacacacgtaaatagtagaaagtttgtttgtgcaggtgtatagttttagttttctttcttttaacattcttgctttttagaattattctactaaataatattaacttgttcaaaggtgtattcacagtttctcttgatcatgatgttcattgacatttggttttctaaataaaaaagaaagtttgattactattgaagaaaagttggggggaacatctcactgtgaaatatttggtcgtattttgatatgttaagttgttgcttttcaatgtgtaaaaagcttttcctcttgggattattttacagtctacctctaactaaatttcattcctgacttctcagtgtattgaatgcttgcatctgccacacttgggggaaggaagcaccatgaaaatgctgttcttgaaaatttttacccaacttcaaactgtgttacctttttatttctgtttattttctcaccaatatgtttctagaacattcacattagctcatatcaccttagcaacctcatctctgtcaaacacctttgcccttgccctggcctcattatcagcattagccagtcagtcacctgtttgggaaccaagggctcctcaaaatcgtgcagtttgaaatagattttgtcatgctatgcttacgggccaaagcacccagaggtgtaacaaacacttggtgtttagctatattttagggcaacagattccgaatcttcccccagcttggggattcagtgtgtctgcctagatcttcctgagtcacctcccagttgatatgtgaaagaagcctacaagcccaccgtctttcatatatcctccctgcttgtcctgcctgttggagtttgatgtcatttattgcttctctcacctcacatcagttctgttcaacaattttttattgagcacctgctaggtgctaagaataaaagattactaagtcagtcatgatttctgttcttaaggagctcactatagaacagaagtttacaatagagggtgatagaaaggtgtgctcagggttcactgggtcataatgcatgacacctgatttgtgaggtcaggtgtggtgggacatatgcctggacaataggcaaggagtccaatcactaaagatagtatacttcatccagtgccatcaagaagctatgaaaggtcagagtggtgttttagattgtgcaatctagcagctgtatgaagaatggatttagtgggagccagaagtagtactagttaaggagagccaaggagagtcatagtatttaaggagagaggtggcaaggacctgaaccaaggagagttttaaggaatagatgatgatgcaaatgaaaactgtgccccttcccaatcttttgggttagattccttctgggaatttaggatgtaatcagaatcagatgtaggtcaacatattcccttgtattataaatgtaggttgacagcctctactccatggaagcagcaccgctctgtccccattgctggtctcagtttctgtttccataggagaagcactacttggtccgcatagctggtcctaacttcagtttctgtctcccatactggtcccctgcctagctcccactggtctgctttacaagatcaccattgaggtttatgctgaccattcttaggagcttttcctgatgggtcactgacaaacatggtgcattcactatgaactttacgatcttcatgacacaaagtgaagaataaattagaataaattgtgttaagcacatttcattgattcatggagtagaatttcccttcactaaatcaatgcaatgagacatttcagttggggaagggggaagcagagactatggtgttttctagatagactatggggttttcagaattatgtcatctgcaaacagggacagtatgacttcctcttcctatttggatatcttttatttctttctcttgcctgatagctctggccaagacttccaatactgtgttgaataggagttgggagagagggcattcttgtcttctgctggttttcagggaagtgcttccagcttttgtccattcagtatgttgttgactgtgggttggtcagagatggctcttattattgaaatatgtgccatcaatgcctagtaaaccccatagtctctgcccaaaagctccttgagctgataagcaacttcagcaaagtttcaggatacaaaatcaacatacaaaaatcagtattcccacaccaacaacatccaagccaagagccaaatcaggaaatcaatcccattcacagctgccacaaaaagaataaaatacctaggaatacaactaaccagggaggtgaaagatctctacaatgagaattacaaaacactgctaaaaggaatcagagatgacacaagaaaatggaagcaaattccatacttatggataggaataatcaatatcattaaaatggccatactgcctaaagcaatttgtagactcaatgctattcctattaaactaccagtagtattcttcacagaattggaaaaatctagtataaaattcagataaaccaaaaatgatcctgaatagccaaggccatcctaagcaaaaagaataaagctggatgcatcatgttacccaacttcaagctatactgcagggctacagtcatcaaaacggcattgtactggtacaaaaacagacgtatagactaatggaacagaatagagagcccagaaataatgctgcacaccttcagccatctaattttcaacaaagctgataaaagcattggggaaaggactccctattccctaactggacctaggataactggctagctatatgcagaagattgaaattgggccccttctttcaccataaacgaaaattaactcaagatggattaaagacctaaatgtaaaatctataagtataaaaaccctggaagataacttaggcgataccattctggacataggaatttgcaaatatttcctgacgaagacgccaaaagcaattgcaataaaaccaaaccagtgtctataaggaacttcttaaacaaatttacaagcaaaaaccaaacaatcccattaaaaagtacacaaaggacacacacagacacttctcaaaagaagatacatccagccaataagcatatgaaaaaatgttcaacatcactaatcattagagaagagaaattcaaatcaaaaccaaaatgagatagcatctcataccagtcagtatggctactattaaaaaaataaaaaaatagcagatggtggcgaggttgcagagaaaagggaatgttcatacactgatggtgggaatgtaaattagttcaaccattgtggaaagcagtgtggcgtttcctcaaagaataaaaacagaattacaatttgacccagcaattccattattggttacaggcccaaaggaatataaattgttctaccataaggacacatgcatgcatatgttccttgcagcactattcatgatagcaaagatatggaattaacctaaatgctcatcagtggtagactagataaagaaaatgtagtatatatacaccataaaatactctgcggccattaaaaagaacaagattatgtcctttgcagcaacatggatgaagctagagaccattatcgttagcaaatgaacacaggaacagaaaaccaaatattacatgttttcatttataagtgagagtcaaataatgagaacaagtgacccaaggagagaaacaacagacactggggcctatttgagggtggagagtgggaggagagaaaggatcagaaaaatacctattgttggtacaccaaacccccatgacatgagcttacctatgtaacaaacttgcatgtgtacccctgaacctaaaataaaagttaaagggaaaaaaaagtaaacatgttgtagaagtcacaatctatgacagtcttgttctttgccttctccattgcttcttagtaatctgtaaagctattgtttctgatatgagtcagtttctttgtccttcccttttacatttcctctttttttcttaccttttttgagggatcctaagagagcgttttagaatggggaattcttaaagaaacctgcaaaatatattttctccattatgttaaactccatagcaataaacttggtttaatgcggtcagttttatcacagatcaggcctccctaaggcgaaggagctaagccagtaatttgggaaggctttgaagccacatgtgcatgtatacattaacctctaagactaaccataatttcaattaacataaaataatctaaagacatgctgattagacaccgtgtggctttaacaaagcattctgggcagggggttggggaatagagaagctttaactattcctagcaccagcaagcagggctttctttaatcatttataacatattttctcaacctttttttcttgcgatgttcttagagactaaaaacaacaaaattccaaaagcttttactaattaaaaagagaggaactgaaactgttatagattatgtcagtgaaatccactttaaaaaaaaaaagtaaaattccagctgtcctttaaagtatatgatttacaccatattccagtaaattgatgcaggccgataacttttcattcatttctcttgtgtgtcttgtggggcatacttagagcagtcagttctcctagggacaaagcaggaagactaactcgagcccatgttgctttttatgatatgtggttttgagtttcagaggagtcgagtgcagtgtgaatcatagaagcagccagctgaaaaatcctcaaccctataacaaaaagcagattttttcccatatttcttccaagtttttatttcacatgcaagtctgagatacaaaatattctgtaaaattttaaggaagccacagtagttcttactgtttggggatttcccggagagaataatcgtgttcagaatggtccttttttttgccaaaaggtttattatgtgaactgaacggctcaaccaaacagataacaccatctccattttatttttacatgttatttactggggtttccctgaagaaagcttaagaattctttccccatgagtcactgaccaagtaattgtttttttaaaatataaactttccttcagctggtcaatttggaacgcagtcttctcatcttctgttcacttcagggctgctttgccttcatctgtaaatgatcacgtctacagccaaattgagcagctcgaatgtagccaatttctttccattgagcactcaagtttgaaaaatcaacagcccggccaggcaagattcagaggacttcatcctctgaaagtgacttacataattatattttcattgcgttggcaaaaaatgcctctcattggtttaatttctgctggaattaatgggatgaggaattgcaaccatattttgccaagaattgtgagtggttgctctgcccaggttatgttacccttttactgttgtgagtgggttagaaggtattgtcttctattctcgtcttcttattgaactagaggctgtaattatttcccttggtagtggctgaactttctctttaaatattgacaccttcacaaatgtgttaaaacaagcgttaaagttggctttttccccacgaaaatggccctataattgcaatcttctattctgaaggagaaatgttgttttacagaatatttctgaaccccttcccacccactttcccagtggctataagaagcctgctgttgccaactgagtggtctagagtccctgctaattacctccttccacagcttttgatttggagccgaactgatggcgccagcggctgaaccacagtcagatctacaggcctctgatttgccaaatggaatctatgcagtttgtttcctttctcacagtgttttatgatgagactcagctcaaactcgaaatagacgaggaatcacttcaaaatattaatggttgatttgaattttgaagaaaaatagccatcagaattctatattccattaccaacatacatgtatatgtgtacatgtgctcacaaaaaaaatcacaaaatgtgtttttctaaagaagcattctattaattgtattccattaagcatactagtaccaaaagctttcagaatacttcatattttatagccttataaaagttttattctatctgttgatcattaatatgtagggtctcatgtccacatcagatgtgcctagagtttttctctaaactggcattcttttaaaatatagcttggaaaagaaaacataattataatcatagagggaataagaattgtctttctcgaaagttcagaggcattagcctgaaaccctaacagttagttgagagtttctgtttctcatttcatagaaaggaattaaacaaaaagctttagtttcatcacagttaaaaatatttagttctcaaaacatattttctcagctgtgtcttgctttcttatttgaggtttcttcagaaagggaaactgattatattagagacaataatgttggaagacaaaacagttctcagccaagtgagaatgaagggcttcctaagtgaactactcccttctctccttattaatttggctccaaagtcaagcacatcaaaatggaaagtagttctcattctttttattgatgtgaagtcaaaaattctgcataattttaaagagcagataatctaaatcacacatacatatacatacatacacatatgcacacacactgttatccattagaacaagtcttctttatcaaatacctgacttttaagtgtatttgtgccacttgatttacttattcattatatagacatttagttagcaccttccatgtgtccagcatcatgcttgattctgggcatgaaatagtccctgttcccagggttcccagtttagggggagactgataagaaaataatttcatatcaccttgtaacataactgctatcatcgttatgttaggaggtggagatgagaggtacctaaattacattttcctaacaagcaaagatgtagattagcagccgggcggatcacgaggtcaggaaatcgagaccgtcctggctaacgcagtgaaacccagtctctactaaaaatacaaaaaaattagccgggcgtgcttgtgggcgtggttgtagtcccagttactcaggaggctgaggcaggagaatggcgtgaacctgggaggcggagcttgcagtgagccgagatcgtgccactgcattccagcctgggcgacagagcgagactccgtctcaaaaaaaaaaaaaaaaaaaagaaagaaagaaaaagatgtagattagcaaatgctttgaagagaaagtgacttttgaatggtcacttcaaaagtaagaatcaggaagaaagctatggaaaagagaatgcatcccagacagagtaacagtataagtaaaaattcagagaaatgagagtttattggcgtaactgaaggtccatagctatggctgcatgaagtgcatgtgaaggtgtacagtgaagactgaggggccagggaggtagacagagagcaaatcgtgctgggccttgtatgccaagggctggaagactttatctgaagagcactgtggaatcagtgaagacatttaaacatgggatcatctttatattttagtaagagtgttatactaggagtgagtaagtatattaggatgtaggactgacgactaagatactgttgcaataggtaataaatgttgaaattgggatagacagacttctgttttaaacagaaggacaaatcagacaccctcatggacatatacacatatttatagtttaaatgatgaagaaaatagatcaaatttgtattaaatgcactaccaaaatgaattaaaaggaaagaatccatagaagccagaaaatgacacgaaagcaggaaactaaagcactggtttccatcctgaggatttcacccaaatttttgagatcttgtgcctccatcatggtggccaaataatgcctggcaaacaggtgtaaagcttagtacattccaagttccaaagactcctaacaggagcctgtcacacaggctgggactggaaaaaactgtatcctggtctaagaatatactaaaaataaaaccaatgtccagaagaatgcagccaggaaattatattgtattgaccttggcactaaataaaaggggagtgatgggtggtgatctgcctttaaactgcatagccacaagtttgcccccatttgaatgtaaggtctgaattcacactacatgtgtgtttgagcatctcaaacctcaagtacagaatttaattttcctgggttagtaccaccctcagaggaactagcagaagccccccccgccaaaaaaaattatttcctctctgtaaaaatgcaaattcgacccaggccttaactccccaagatagagttctaaggaaaatgaatagcttacaaagaacaaaggaaggaaggacataggaaataaaccactactgagaataggagaaacaacaggctgtgaaatcagaccttcagagatgagatatttacaattttggagttactaggtacagaaataaaaagttgtttaatatgtttagaaataaagaggctttaagtatgagaagaaaagatcaagcagattgggggaatgacttctagaaataaaatataatcactgcaatgaaaaattcaattaaaagtgtcaaggaatcagattagatatagctgaacagagaattagtaaactggaaaatctgtagtgatatgaatacactgaccagaataaagtccaagccagaataaaatccgaaagaaaaggattgagatcacagattgtgttagatgagttctaacatgttctaatcaaagttctagaaggaaatagtagaatggggaaacacagtattcaaagacgactaacagaacgttcataacagcactgtttgtaatagtgaaaaacctggaaataatctaaatggccattagtggaagggcaaattagtaaattgtagtatatttacacattggagtattatatagcatcccaaacaagtgaactccagtacattcaatggtatgcatgaattggcaatataggtaaaagaaaattatatataatatattcttttttatgaaactaaaaataactgataaaaataactctttaagactaaatatagatgcaataaaaccataataaaaggaaagtaagggaatgataattattctcactgatagttactttgagtgggagaggcagggggctgagttggcagatggtattacatgatactgtatgaacagatgcagacgaaagtgtgccatgaaccaaggattatagttaatccaattccgtatactaaaagtacattgaggaggtaggaggagagagagaggttgagaattttctaaaattgttgaagtctaacaattcttagaatcaggaaataaaacaattctcaaataggatttttaagaaatgatacataataagtaacaacaagacacatcatagtgaaactacagaacaccaaagaaaaaaagatcctaaaagaagccagaaagctaggtcacctacaaaggagtggaattagacggactgctgattagtttaacctgtacaatatcgttcaacagatgagtggtagagccaggattcagatccatatcttctgattcctatgcctatgttccttctaatactccaccaaaatttttcacacatttatgtacagagtattttgtgtactgaaataaatgtaaaccaaaaaagtaatggaaagaagaaacccaataaaaagaaaagttagtgttacctaacatatgaaaaatttggtaaaatttacatgtatttaggtacaaaagagacaagggaattagcatttgttaaattcctaaatatgtgccaggaatagttctggtgctttaaaaaaaatctcattcagttatcataacaaatatttctgagctagagttcttatttccattttgtggtggaaaagactaaggcttggagagattacatgatttacccaatttcaaaagttagtaaatggtaaattcaaattctgaaaaggtgcagccagtcccacctgacccatcgtcttcccagtagcattgtcagtaaacgaataatgtaatttatattacctaaggtgtcctaaacagagcaccttctctggcaaccttctgagaccaccacccccagtgtcaggggttattgccctcagagacatgtccaggaatattagtttttcctttgcacttctctaggcttctttcccacttggatgctctacagattcctacaccacatttgctcatccatttaaagtgctatatactgactattttctaatggttttagggttttgaatccttgctattacacttactcgaaaaattactaaatccatttgcacctcaacttcctcatgtgtaaactgggataataacacaccttttgaggattctcgaaatgattagctgagaaaatgaaatccataaagctattagttcagtcgctggcacttgaaagttttcagtaagtgactactgctgccattattagatcctttgcaggtacagagacagcttttatagtcagagggaattcattttgtctcctagtttgcctaagaataagtgatccatctttatttattctactgattgtgatctgacatagtcttggacctagttattattaattttagcatatgttaataagaaaataattataaaatatcctgttctgaatttcatttcaagataatgtgaatatagcaatacatgatcaaatatctattttctaaattgagattttaaaaattcccaaacttcatcccctgagttgaattcactagaatgaaataaatgaagacaatgttcactaagcttctaaagaatccacatgttaattggatcagtttgcccaaagactatttttgcctttaggatttattattctgaattaagtcattatatggttgagtgattatgtaaaaaatcatattatttatacaatgatatgtgaagaggattactataatgcaagaggttaaaaacatagaagcaccaagccctcatgtatatagaaaactcatgctaaggccagaagaagcagaaggagagtcagaagaaatataccaaagtggtaaacatgtatgctgtgctatgtgtgcccacataatacataggaaatgctaaattggtatcgatttctgaaaataaaaatgcctgttcttttttcaaattatgcaatcctgataagcctactaggcatatacatatatatccttttaactaatcacgttatcatttttttccaacaaagaatataataaatgaaagtcaccttctgggtgattagtggcagttgacttggagtttcagcccttcctcaggactttttggcatagtaataacattgcaaagttgctcacatttttcatacccttccattttatcttgtgtgtgtgtgtgtgtgtgtgtgtgtgtttgtgtgtcttgtatgtggaatattcttacagctagtgacttaatatgctgatgaacacagagagctggattttttttgcaaaccaatatttttgtgccatttgattatttaggtgatattcagccttttcaaagattacttaactgtcgtggtatcactacagaggaagaaaggaaattctgtagttagtttaggagaaaacgtaacgtaaaacaattcttcaaggaacctagcaatgcaataaagtatctagataatcttttagaatatcagagcctggggtatgctaatgaaatcatgggagaagaaaaaagctccagttctcactcacattaaaagtgctctcttttacacaagacacaattcataaaatctttttatatcagcagggaactcatctatctgtatatacatggaggcaggcagctgttaacagcatagcatgacactgctgaacagttcaggatgcaggataaggaatatcattctatcattcccaactgaaacaacatcagaaaatgtagacaggctaaatagaattatccaaaatggagcctgtctgaaattccaagtctcccagagacaaaagtactattcacctcttcttcctttctatggctgaaattcatttgcatccactgacatcctttaaattattaccctcctgggaaagtctgcaacccttgtagaacacttataaacattcagttgtttctgatcagacctgtgttgtttgtagttctcctgactcatattttagtatcttaggaaggaaaatttagtgccacaaatgtttaccatctatattctcttggtttctgagacttcccatggcaattaaaaaaatttagatattacaccttttgcttcaaaggtcataattccagaagtatgactcttatctgaccttttagaatgataaatctaagaaatttttgtgttccagagaatgaatacacaaaatgggaactagtgagttccaaagcttctgctatagaataattgatggttttctccaaatatttgttaaaattttaatataataaatactaggattttttaaagtaaacttttttagcaataagaatttagcacttccaaagcagccacatggtctgttgcccaggactcccttaaaaattgctttgctgaggctgttcaacatctgtcagcattttctgcataaaccattggctcaaaaaaattcttcaggctgaaacttgatatatcaggtctcagcttagcagtttttatgtgttttcaggaaaataagtttggatgttttcaagttagtgctagaggagaaacacattctaatacaccatttcaagacacccttttattttatacatgggtgaaaggaaaacagacttctacccaactaaaatggacagaaaatatctaaacaattgttgtgaagttttcttcacactgtattgctaaacaggatgtctttattggagctatgtgactacattcttcatagaatggcatatggaactctgcccagctttaatgccagaggtcagaatgtgcccacctcctggcagctgaggatgaatggcttaagtgacaaattccgatccgtcagcttcccagatcattgaacagccaaaggagactaatacaataaacaacagtttgccaaaaggcatcatgatccactggtggattgtggttttacacagcttcaacatacattatcctgacgtctaaaattacatctcagagtacagctgtgtgtgtaatactggacttcattccactggatgatcccatgttgtccacttacaacaggaatgcacttttgaacctagagctgtcactacaaatctcactgtgagtgttaagaattcatgaagaaattccaatttattgatttgcaaggatttgcctatgaaggtagagagattgtatcttaaaattgccattccattaaaggctaaaaaagtcatttcaatgactaaagttcttatatcttttagttgactatttgtaaagtgaactttttttttctttttatatgagtgttaactggaaataggcaaggaatgagcaggactttaacattctagtcctctgtgtcagctgtctgtgttacagaatttatttgaactatagagtccctaaatcactacagcataagcctcagggaaaataaaaactcaaaaatgtataaacaaactatactaaaattgagctactgagcaccttagtatacttgcttccctttagttaacgtattttcaccaacaagggtgtgtctttcaaggctatctggagtatacctgtggttttagaaataccaagtgactcacctccagtagttacagtggtaaggaaaaagttgttacctctttcctttggtgattctggtgcacatttggaagatacagctcaaagcaatcaataccctgggcctctggcttctaatatattaatgtctgctctctggaagacccatatgcaccacctgccctctgaatcctgagtgatccagatcctttggaggacttaagtaaataaaaattaagagcaaaacaaatggtcttgaaaatcctttccaatagacacaagcaaacacaatagggatctgatcatttcactttcctaaattttctgtttccccattcagcacagtggaggaggacctctgagattactcttctttttcaaatccccacctcaaggtattctcctcacacttccgccacccacatacacccctgatgctccatccaccaagcagccatatccacaggccacaggtgcaccatcctctgccctgtttctgcacctttgcatgtgtagttcctcctgcctgcaagatgctgtcatttattctataccggatgaacatcttcctacccatcaaaacccagatcactctctgatacattctttctgcattccatggaatatatagatttgactgttactggtttataatcaaatttgtcatctttcttcacaatagtcctaaggtttatgccagtcttgtccctgtctcactaataatgaaattaagatttgtagatataaaataatatgacacatattaaaagcactcagaaagctaagggtttttcttcagagcttttattcatttttgtatctaatgttgaaaacaagtaaaaatatatacagaagagcccctagctgaaatgtattcatatggccccctgacctaatcacagattcttctatttcaacagaactttcttcctcacagatataagaaaatgtcccacttttcctgattgatttgtgcttattgattactgaacttagagctcggaaacttgaattttcattttatgaacgctctcaatttattgtatggccttggaaaaattatgaaacctttttgactcttagcttttgaaaaagcaaataataagtctacttatatcatgaagctggtctaaagttcaaaacaaactatataagtgaaacaacttgaaaactgtatgcctctacattcatacaaagtatatattcatatttatatgactagtgtacagtattattatcagtatcaaagaaaactaaaagtctacagtatatggagcccaaataaaatttggccaaaaagagtgcttaggatgtaaactgctttcagtttcaacctttgattccacttactcgtggttcacggagagctttgtaaggatcagtaacttctccgaaataggtaataatagtgctaactgggaggtatttaggacataaaggtgttggggtgtgtgtgtgtgtgtgtgtgtgtgagagagagagagagagagagagagagagaaataagacatttttgctaaagaatatctgaagaaaaaaaaggccaaggacaaaatgttgtagaaaaaaccgggttcttgagttcttgtctcttgaccaggaagagttagtcacgcagacactctgaaggatgagagagaacagaatttattgggagaaaaggaaaaaattctcagcaaagtgagaggggttcctgttaacaggcccccatttcacagattgaatcctggtttatcacacagaaataggagaggccaggctcctccccactgcaaatagcaccaacttcccaaggctgcaccctgtcctctcagtgctcaggctggtgggagattctctggggactttcccccttatcttcctcctgcttctatcacaatgagaaatctcaaatctttattattctaacctgtaataagtccacaaagacatgtagagtttgatttctagtggttttttttagactggctatcttgacttcaaaatatctaggaatattaaggacaatgtgacaattgctcttttaaattcctgactgagcacacaggaggatgagaaattcctgggtaagaaaataaaaagggagctggaaagcagagggcctatggtgaagccacagctgtccttggggcatttgctatcactgcacacaagagctttggatgtacttagacatatggagataggagaaaatacttcagcccgaaaaaattggggaattggaaccaagacccctacagtaagccaggacacttaaaaagctacaccttcagtgaaaatggtgaatcaagaaaaatccgcttgccgttaaaaggagaaaatgaggaaagttatttgtctcggcttgcactgtgaatggaaggagagaaaagtctttgagaatccatttgtataggttcctcattctgtaatttgagattcaaatatgtatcacttacatgcgcaagcagaaccaaagctgagaaattaaagtggaccaaagttggaagcagttctgggagcctgtagaaacataaatactctctggagcaacacaccctcaaatcagatctaatagaagcccagctaaacttgaatacacaatccaacatttaaaaggacacacacacacacacaaagccatcatgagtaagtcaagagaataacaaacagtaggaaagattttggactatatttaaaaaatttaaagaaataaaagagcaaatgacaaatttgagaaaggaacactttctaaagacaagtcatatttttaaaatagccaaatagaacttgaaaaatgaagtgcagttattgaaattaaaattttatgaatagattaaacagctggagagagactacataaaataggttctacacagtggtgtgctgatagatgtttaataagtagctgtccaggatgggggaaagccctgttctgtagcatttgctaatttccatggtgtgaatgctcccaccattggtagtcaattttaagctaccaatgtgacgtagtgaactggaaagagacgtgtacagttggttctcatgagctggtataaaccagctcctatacacgattggatatataactgaataaattacctagaatgtaacacagaaagatggaaagataggaatgtatataggacacgaaggacaggctgtgaagatctaatatatgtttaatcatcattctagaggagaataggagaatgactaaaatgtttccagaactgatgaaagtcatgaattctaagatctaggaagaccacagataacatccagacatacattataatgaaattgcagagcaccaaagccaaagagataaccataaaagcatccagagaaaaaatatatcaactactaaagaacaacagttcagacttcttaagagcaaaagtggaaaccagaaataatggaatcatcttcaaagtacagagggaaacactgccaagctacagctgaatacctagttaaaggattattttaaagtgaggcctaataaagacactttcaggcagcaaaaacagtttgccatcaaagataaaaggaacgaaacgaaaaaatgtactttaggaagaaggaaaatgatccagaaggaacatggacaaagaagtgggtaaacatttaggtaaatctaagccaatattaaaacaacaagaataatagtaatgtatggtgattaaaagccatctgaacagttttattttctcacaaatactaaacagcacttaatttaattacattgccatgtagaagttttaaccatattttgttcatttttgacttataaaacaatcaggaaaaaacagtaaacattgttatataagatttacttattttaatccaagttacactttgctaaacatactgaaaatttgacggggttttaaatttgtaatgaaagagccatagactcctcagaattttttttttaattgtgttgatcttgcacattctattatgattccaggtcattacctaagcaaggatttccaatttaggctgagctgggaaagacattattatattaaagtttatggttatgaaaactgtacccccacaacactggaagtacaggacctttgtttctctccacccacatgctggtgactttttaccactaggagagttatgtactcactgtgactcacagaaaaagataaggttactttatactatctctcaataaatggagccaaggatccttggagaaattccaggactggggcagagaaagtacaagatgagcctggaatgtctcatgatgctagaaagtaaggaagtgctcaaaaccttatggggatatatgtgaaaaagatacaagaggcaaattacaggaggctcccaatgactaaatctgggacaatttcagaaataaaataatgacagtaatggattataatccatagaataaaataagaatccatacttacataaataaacagttgaatgagtaattatatgaaggagaagggaaagctgttcctcataattaattaatttagaagagaagatcaaaatttaaaaatcaccatttgcaaaacatcacagtaatagtttctcttaagaatcatcaatggatgttaaaatgagtaggtaaaagtatgatgagaaacaggatattcacatagcctcaaatatcacccgcaagatacttattaatttcaaaggagaaaaaatagaaactttacagtggagaaacctggaagacaccatcttaaccaaatgatcaaagttaacatcactagtaatgagacagatcgacatcacatgtctcctgatgtaatgcactgagaaagacacaccatttatgtggcgtgtttttgctaaaaatgcacaacctgaaattaataacgaggaaacatcaaattgaaggacactgtacaaaataactggtcaatactgtacaaaattattagggtcataaaagatgaaaaaagactgaggtattgctccaaattaaaggagactaaagaggcataactaaatgtaatacatgattgaggattagatcctgggtcatagtattacaatgtcaatttccttatcttgatcattgttgtgtagttttgtaagatactaacattcgaagaatctgggtgaaggatgtacaggaattctttgtattaattttcaaccttttaataagacaaattatttcaagatgaaaattattttacaaatcaaagatagtgttaatgatagcttccttagacctctccatcctcccatattctaagaaaggccatttatatgttacctccagttctgtccacagacatcaatgcatggcttcaggaaaagtgggccaagtgcaatgctgaacaggaaggaaacagtttgagtctgaagcacaaggttcctactgtgctgaatcagtgtggtagaggctattaaaatgccatcttttcctacctcccactcctctccttcttctgccttcataccctacatcccagaccgcttttaatcctattgggagggtatacagagagaaataaagaaaaaataataatgaatggctgtgttctttggcacatgaatagcagtttccctttcgggacttcaagaataaaaaatgagaggctttaaatcttgctaacttgtgcaagaatgtgcgcgtgtgtatatgtgtgtgtgcgtaggtaaaaatgtaaatgaccactatggaaagaacaatgctagcttttaaaatctactaaagtaaaagaaataattattcctgaataaggtatgtcaaacaccagtgggaagaaagaagagcgggttattttgtttagagctggatgaattaggaaaatccctttttacagctaactcagagatgagctgttgttgccaagatgtggtttatcaaacatctaggctatctcacaggatgtgagttggtttagctttgtaaaatagctctatttttattttagccaaatctctacaagactctcagtcagctccctcccccaccagaatgaaacagcaacaacagcagtgaaacctgactgaaacagcagagtaaatgttggccagaagcctgctgtgatccagcctggcttttagaaggagtctctctcagtttgattcattgcttctcacaagccagctccagactgcttttcttgagataaaataagttgtagaagtataaagggaatgttgccactggtaattctttttacttaagataataaaaagcacataaaatttccatgctcatatttgactcctttccgggtctcccttcctgattctaacacactgtggaaatggtgcaaggaaaaaaaagccacagacagagtagtcggtatgatttcagaccacatgactcattacttgtgcttctttctggagcagtctgttttctgtgagctggcttcactctggttaatcacttagcatggtgagatttcacctggttgcccctctggtggctcagacggggcctggggcatcactgaatttatactgaaaatcagatgggcatctgaacaactcccacaaaacacacacacacacacacacacacacacacacacacatttaatcagcatcaagtagtgcagtttcctttctaagtgatgggagctgctggctgttgtttttggcttgaggccgcatagaccagccagccgttgtgtaagcatggtctgtctgaattgctttggggctgtcttcttagaaatcttcttgctgttcattattttgccagcaagccataactattactttttttttagattcctcaatctatgttttctctactgtaagatagtaaaatgtagagaatcagggagccctataaatcttgaagattttttttgtcttaatttctttaatttgagattggcatttaaaaccattgtagaacttgtgaacttgctaagtttaaactacaatttggagtagggagtaataaccaaactgttcttctcatgttgttttaaaagcttctggtgtatatgcctttttattttttactcatcatacagtctattcagaaaaataaaaaaaaaaaaaccttaagtagctcttggcagaaggtcaaaaccagcatttcagggaaggtatttaaaagtcttttaagtgtgggctatttgtataagcaatatctgcacgtttcttatgactgggaaggactattttcacagtctttcatggaaatatttctagacaattttctgcggctcttttccctgagctcatttatttgcttttgcttcagaacacagcattttaatgagcagttttatgagcctaacctgcgttctgcaagctccacatgactggattcctgttgcacataacctttgccctattttccattaaaacacaagactttcctataatcaactgtatactatgaccttggaggaaaaaaatgcaacagatagtttagtctactatttagtctactttagcacactaaaattgatttttttaaaaaaattagttgtttccttataatttttaaaagtgtacatattagtattttcatcacaaatttattttgtaagatgcctaattcaatattaccatatccctctgggtaaataactcatttagctatctttataatccactgagggatgtacaaaggtaagatgaaccccaaatcaatttggaattatgaacattcaaaacaaaataaaatgcaaagttttctatctccacttggtcttacatataataataggtgtcaggaagttccttcttatagcaaagctaaatcatcatctgatgcattttgactcctctttgtgctttaattcaaatgtaaaacaactatttttcactttatagatagtatcctactatttttatatagaataactttctcttgtataccctgagacatccaaatttgtttacttttacttccagtattttaatccgttttcttaatatctgctaaatattcaagctctccctttcatttgagcagtagagcctcaggcaaaatgcagagcccctgcaagggtctaacaagtgctaagaacaatggagctattgttgtgtaacacacccagctcccctctggatcatgcattccagccatgtttgccttttaaaactacactatggatttaaggtagtctgcggttgcttgtaacacctttgctctttttctgccctgcttactttagccaatctgtcctcatcttataattctgtttacattttcttcttaggacaaggaaggcactctttaaaacagagtgcagtaagtttagggcaaatgaaaggaaatctacttcacatagcaggttataaacttgtggaactcattagtcccaaaaggtgggactggcaggaaatgtaaatgaattcagaaatcttttagccagatttatgaatgagagccacaaatggctactaagaaaactggggctatacctgacttttacaacagaagtcagagaacagctttgagctcccgcacaggatgactcttgagacttattggggtggctgaccttgggtctggcccactatgggatttcctgagcatcctgtgtcccttctgcacttgttctcgtttcactgggtctcagaaagaaccagtaaggcttatgtgggaggggcaactttctttttaaagtagagactagaagaaagcttcgtaacttctcctttcccgttcaaccatttgcctaccttagtgccaattatgacggtcagggaatggtgatgtctgtctagtagaaactagctgagatcacatttgaatgttaaaacatagatactttcttttacgctaagtcagacacttctttttcctgggaattttcaggcctgagaccataaatagcatttttatttcatcctgtactctatcctcagtagaaccttcaatcacttaactcccctgcttttcccagacttatatctctttactgcagggttctcaaactggagtacttaaaaaatgcaaatgctcctggcttcaccccagaccaattaaatcataatatttgagggtggagcccaggtatcaatagtctttaaagccatcccaggtaattctcccagcagccaagttgagagtcttgacctgacaagtagtgttaggttctctccttaccctgagctccctgtttggcatctcagtgttgtctgtgacatcattctgcaatagccacctctctatgttaaatgtttattagtgattatggtgaagctttctacacaagtcatcagtgctaggtctttatgctttttctgtccttccaaccgtgaacgcttagtaaaagaaaacttgctgcaaaatctggaccattgcaaatacccaacacttataagaccctgccctcctttcactcacctctttgttgactagccaatcacctgctccaaaaatgatcttccatcacatctgtccctcacttttcctgtaggcaagaatgtcacctcttaagagaatacagaagccaaccagaagaagctgcccaatacctttatctttacctcagctgagcattcttccaccattctcttcttattcttcctttaaattgttaaaaagaaaaattccactttcacttattaaatatgattgagtaccaactgtgtgtaatacattaaaatacaggggagaagacctattagaaagcaattaacaataatacatgaaaagaatataaagccttaacgataagaaatgtttaataagctatgagtgtctaggaaagagggatcatttgggccaggtcttgaataatgaaaagattttagcaatcaaatatcaggcaaaagggcattcagattcaaaggggcaacatggctaaaggcaccaggtcgtgatgtgcatggtttgatttgggaatagcaaaaggtctggtataactggaatatggcatgaaaggtgaatttttcgagtatttctcctgtacagcatactgaatctcatttgtttgttgttatttctagtgtctttagtcttttgccttctggcttctttttaaacttcatatatacacatgtcttccctggcctaaaagaaacatctttgacccaaccctggtatcttgataaacaccgtgccattcccttcatttttctgccaaactttcacagtatgacttatactttctttcagccccctttccacattctgcacctcaccctcctaatccagcttctggcccccctttaatcctatccacaaacccccatccccacagaaaagctctgttaaagattcttccatcattcagacaaagccattgccagccctcattctatttaacctcttagcaatatctggcactgttaatgactgcctttttcttgaaagcttttttatctaaagtagcctgggatgatgcatgatctttgaaccctcctcaccttttttttaactccttatggtctcctttgctggcacttcttccacctccttaactgtgaatattcatccccaaatactttcctccctctctttcttgtttcattccattatttattcttccattctgaaagcatttactgagtactcacactaggccaggcactttgctaaacacaaagacaaatttgtttttttctgtacactcattgcttttaagaatgttttctattcttatggctccagcttccaattttgtatgaaagatttctaaatctacattttctgttgtggcttctgaatgctcattctgtgattccagttgccaccagatatgtcctttgcatctacaaaatttactaaaaaataaactcattttttccataaaaaccgatttctctgcctcagtttatttgccccaatctatgaagtcaccatatcagtcttcaagactggacatctgagcatattattttactcttaatagattttgtatccaatctgtcacaattttccaataatttcttcttgagaatgcctttatgatctactggttacctctccatttttatagaaacccacttgattcagacttcacacatagtttcttactaaagacaataattgatctccctgcttccagtctcactctccttaaataaattcagcctgcagttgccatactaatcttcctaaaccactgcttgagcacatcctttctggtgacctttcaagcccaccacatgtcatctcatctccttagcctaacccaagttctccacaatctgaccactcattttgcaattcagccatatactcttcttctcaatatatttgttaccatgtcctccccagtattttccctaacacatcaaactaatttccacctccattccctttgtttccctcacctagatgccttctaaaggtctgcatgccccagtacaaccaggccaagtctcactcactttctttccatagccttgcctggctcctgaaacctctagaaaactcttctctcttgaaaggctaattacacttagaggctataccataccacttagttcatattacatgctatctttatgacacattgtttttggcctgttaatgggctcctccccaaatacagggtaaacttcttaggtgcagaaactgtgctgtgactttccctttaatctccaaagaaacctagtgcatgtctcatcatatattaaatgtttaatatatagcctgggttagttgtaataattatctgtgcttcaataaactggtttagaccaagatagactctacaagtacaacagaaacttatgtttacactgtgtataagggggtcattttctgctgtacaacattagtatctagtctgcatgtcagttttgaagtagatgcctttttctaactcaaaaagaggcagttaaggagtaattattgagcctccagatctaaataccaaattataggaaatacaaggagtggaagagcacattaaatgatatgcaggggatgcaatcagccaaatccacactgggggattggacagaatctataggacaaaaaaaaatttttaataacaaattgcaagagcaagaaatagagagatggagaagtctgaagattaaaatagccataacagaaatatctaccaatcacagtgacatggtttggatctgtatccccaccaaatctcatgtcaattgtaatccccaatgtaggaggtggggcctggtgggtagtgactggatcatggggatggatttctcatgaatgtttcagcatcatctccccttggtactgtcctagtgacagtgagtgagttcttataaaatctggtcatttaaaagtatgtggcacctccctgctccctctcttgctactgctctggccatgtgaagtgcttgttcccccttcaccttccaccatgattgtaagtttcttgaagcctccccagaagccaggcagatgctagtatcatgctttctgtacagcctgcagagtcctgagccaattaaacctcttttctttataaattactgagtctcaggtatttctttataacaacacaagaatgaactaatacacacagtatatggacttatttcgattcaaactcaaacacataaccttaaaaacattctttaaagacaactggggaagtgtaatatgaatactaaatgtataataatgttaaaaaattattaatgttttagataataaaaatagtattgtgtttatgttttctaagggttcttatcttttaggattatacactgaaatatttacagataaaattatgtgatatctgagtttgcctcaaaatagttgagaagtatagacggaacaaggttggccatgtggtgaattgttgaagttgagtaacgagagattaatttgtactattctttctattctatctacttttacatatatttaaaatttctcaaataaaaatatttttaaagtagtcagtcattgatgttaagaaattcttgttaaatatttttgatgtgataatggcactgtggttatgagttttgaaaaggaatttttatcttttagaaataccaactgaaatattcatgcatgaaatgaaaataatgtagacattgatgtcgttgcatttttaaagattataataaaatgaggcaaaaaatgtttaaattgtcatttaaaaatttcttatccccagaaagacatccataaacctcaaggtgagaaaacaatactttagacagttatgtaaagcctgttctgtgttttgcctgtttatacctaaagactacatagcaagcaaatctgtgagttgcacatcctgtagatgagcgcaaagagatgagtaaaaaataaccaaacactgtacgtgagaagtcataatctttaaagatacaggatttgtcttaagagtaatggctttaaaaactggattataatccaggtaacatcaaccttcaatagatatacattcagacatgctagtgccagataaagtggctaatgcctgtaatctcagctagttcagaggcttaagcaggaggattgcttgaggacaggagtttgagaccagcctgggcaacatcacaagaccttgtctcttaaaacatttttttaattaattagctgggcatggtggcattcacctgtaaccctgctacttgggaagttgaggtaggagcattagttgatcccagaagttcaagtgagctatgatcacactacatgactgcagcctgggcaacagagcgaggccctttttctaaaaaaagtaaaaaatgaataaataaacatgctaaagtattccttgcttttgaaaaacaaaacaaaaccaaccaaatacaaagaaaactccagaggctttccccaatatcaatttaattcataaatttagtattagccctccaaaaaacttcttttcagtgaaatgttgattattagcaaatttatctgatttcaggaagaagagtcttgtctctgtgattagaatattcatgagcaatcaaatggccagtaagttaatatcagaacctagctgaatgtctggaaaacctacaagttagaaaatcattcatgggtgctcactttagtagcacatatactaaaattggaaagatatagaaaagattaacacagcccctgcacaagaatgacatgcaaattcaggaagcattttgtatttttctgaatgagaaatttaataaagagatacatattataaaaaagaactaaacagaaatcttggagctgacaaattcaatgattgaaataaaaaatacaattgagagattcagcaatagaccagatcaaccaaaagaaagaatttttaaacttgaaggtgactattttgaaataacccagtcagaaaaaaagaaaaataaaaaagaattaagaacacctacaggacctattgggacaccactgagcaaatattcacagtatgagaatttcaggaaaggcatagaaaacctatttaatgaaataatagctgaaacctttgcgtgtcttgatagaaatatagatatctagatccaggaaactcaaaaccccaaatatattaagttcaaaaaggtcctctccaaatcacattatagtcaaagtaacaaaagtcaaagacaaagaattccaacaatagcaagagaaaagtgttaagtcacagataagggaatccccattaagctaacattagatttctcagtagacaccttataggctaggaaagaatgggatgataaattcaaagcactgaaagaaaaaaaaaagatgttagccaagaatactatacctacaaaatctatacttcagaaatgaaggggaaataatgtctttcccagacaaacaaaaactgaggaaattcatcaccactagaccagcattacaaaaattattaaagaagtcctacacatggaagcaaaaggatgataattctaccgtcctaaaaacatgcaaaagtgtgaaactcacttatagagcagatacacaaatgattaagggaaaggaatttaatcttatcatgtcagaacaccaccaaactgcaaagataaataatgagagaggaaaaacagaaacaaaggatatacaaaacaatgagaagacaaaaaagatgacaagattaagtcctctcctaacaataataaccttgaatatgagtagattaaattcccaaattaaaagatataaacaactggctgaatggttaaaaatcaagaccaaactatatgccgcctacaataaactcactttacctatgaagatactcatagactgaaagtgaaggaatgaaaatatatattccatacaaacagaaacccaaaatgagcaggagtactgctatggtttcactgtgtccccacccaaatctcatcttgaattatagttcttataattcccatatgtcttgggagggacctggtagaatgtaattgaatcatgggggtggtttcccccatgctattctcatgagaatgagtaaattcttacaagatctgacggttttataaggggcatccccctttgcttggctctcattcttcttgctgctgccatgtgaggagggacatatttgcgtcctacaataccccactctcagcattgcatagatcacctaggcataaaatcaacaaagatacattggattcaaactgtactataaatcaaatgaccctaacagacatttacagaacattctatgcaatagctacagaatatgtgctcttctcattagcacatggaacatgcccccggatagatcatatgttaggctacaaaacaagtctcaacaaatttttaaaaatcaaaatcatatgaaatatattttcttatcacaatggaataaaactagaaatcaaaatcaagtggaactttggaaactgaacaattacatgtaaattaaacaacatgctccaaaacaaccaaagggtaaattaagaaattaagaagtacattaaaaaatttcttgaaacaaatgaaaatataaacataatatatcaaatcctacgcaatacagcaaaagcagtagtaagaagaaagtttatagcaataaacaccaacatcaaaaaagtagaaagatttcaaataaacaacttaatgatgcacttcagggaactagaaaagcaagaataagccaaacccaaaattagaaggaaagaaataataaagatcagcgcagaaacagagattaaaacaacaatacaaaagatcaagggaacaaaaagttggttttctgaaaagataaacagaattgacaaaccattagctaaactaagacaaaaagacccaaataaataaaatccataatgaaaaaatgaaacattacaactgataccacaaaaaagaaatattacaactgatacttcagaaatacaaaggattattggagacttttatgaagaattatataccaaaaaatggaaaacctagaagaaatggatacattcctgggcacatacaagctaccaagattgaaccaggaagaaatggaaaacttgaacagaacaacaattcggtaacgaaactgagtcagtaattaaagtctcccaacaaagaaaagcccaggaccaaatggctttgctgctgaattctaccaaaccttaaaagaagaattaacaccaattcttctcaaactatttcagaaaatggaagggaattttttcaaactcattccatgaggccagcattacaaagccaaaccagagaaggatgcaagaaaaaaaagaaaactacaggccaatatccctgatgaacatagatgcaaaaactcttgacaagatactagcaaactgaatactacagcatatcaaaaagattatacaccataatcaagtgggatttatctcaaggatgcaaggatggttcaacatatacaaatcaataaatgtggtatatcacatcaacagaatgaaggacagaaacaatataatcatctcaatagatacagataaaaatttttacaaaattcaacatcacttcatgataaaaactctcaataaattagaaggaatttaactcaacacaataaagggcttatatgacaaaaccacagctaacatcatactaaacaaggaaaatctggaagctccttctctaagaactagaacaagacaatgatgtccactttctctactcttatttaacatagtactggaagttctagccagtactatttggcaagagaaagaaatgtggctagttccagttgtgatgtgctgtaagtgtaacatatacattagatttccaatactttctacaataaaagaatgcaaaatatcttattaatacattttattttcattaattgattacatattgtattagtttgctagagatgccataacaaattatcatagactaggtgggttaagcaagataaatgtatttttcacaattctagaaggtagaagtctgagatccaggtgttgtcaggttggtttcttctgaggcctctcttcttgactcatgtcatcacatgatcttccctctgtgtgtgcccatgtccatattgcctcttgttataagaacatcagttatattggattagggcccaccctaatgaaaccattttaacttaattacttcttttaaaaccccatctctcaatatagtcacattctgtggtactgctggttagggcttcaacatgaattttgtgggggacacaactcaactcataatgcctgtcaaaataataatattttggacctatttggttaaaaaaggcagtattaaggtaaatttcaacactttattgttactttttaaaatatggctactagaaatgtggcttgcattatacttcaattggacagtgctggattttatttctttgggacaccaaaacactgtatcatcacctgttgaaagaataagaaaaagttctcattttaaataatttgccattttctactatatttcccttttagtactaagttttattttggtattgctaataagcaaaagcagtgagatgctatataaagaagatgaaatgtgcacaaagaaaattagaccagagttctattttgatcttactatctttatgatctcaggcatagcccttaccttttctttaatttcttctttctacaaaagagaggataacagcctacatttgttgagtgattattttgtgccaggtactcttctgaatttctacactactaatttatttaatccatacaacaaccctttgaagattttaggtagtagtattactctatttgagagaaaactgaagcacacagagattaattaacctgcccaagactccagagttagtaagtggtagaagcaactggtctaactccataccatatcatttatttctccctgtacttctgtctcacaagatatttgtgaggatctactgagatggtatatgtgaaggcatttgaaaactgatgactgttaattattttctttgtctgccttcctaggaacatttcagagaaagctattatttttgtcttttgaccagcaaatctatatatctttctttacagcctggtaatttcagaacgaatagaagtgtttgtatctgtgggtttgacacactactgaatcacaaagtctttggaataattctcaaaagccatcacttttagcccactttctcattcattaatgctctattctttttctagcatgtctagcagaattctcttgaattcttgcagtgaattggtgctccttaaatacctgctattttggaatagttttgacttaaatacattttccttttctcccagttgcaaaatgtcagggctgacaactgaaagggcttctgaagattgtcagtgttctcatattcagataggtagcaaagaatctgacacatttggtataataaacccacaaatgttcattagtaagattgtagcctgatttatttctctgatttagaaaacacgcttaaagaaggagagtctgtctgcaaggaaccttctgaattctttttttaattcaagctcgtatatataaatattgtaaactgagatgtcgcttatgtcatttacatcatttatctcaaataataaaaatggttcactttttttgagcactactatatgtctgacactgtggtaagtgccttttctgcattattctcacttggtgatatcacacctgccctgtcctataaaatgtataatgtgcatatattacctccacttataagcacagaaattaaggcttagagaggttgagtaacttcttaactaacctcactaaagtcacaaagcttattagtgacagagccaagatataatacaggtcatctaattccgtagttcatactgttaatcactattccacatttccctcaaaccaaagtggattgagcattcagggtattctgtctaagtcaggcagatatttttatttttatttttatttttatttatttttatttttattttttattttttttacttttttatttatttatttatttatttatttattttttattattatactttaagttttagggtacatgtgcacattgtgcaggttagttacatacgtatacatgtgccatgctggtgtgctgcacccactaactcgtcatctagcattaggtatatctcccaatgctatccctcccccctccccccaccccacaacagtccccagagtgtgatgttccccttcctgtgtccatgtgatctcattgttcaattcccacctaggagtgagaatatgcggtgtttggttttttgttcttgcgatagtttactgagaatgatgatttccaatttcatccatgtccctacaaacttatatttgatgaattctgcaaataggtgtatgatccagtttttcttatagcttctgtgatttggtaatcctcctacagatggtagaatatggtattcacaataatatgaaaaatataattaaatttgacaagaattctattaaaacagcaagatttaccatccagaattatttcatttatttttaattcatcttttatcttaaacataccaccttgatgttatgtgaagctatcttatatgctaccttaagccatatgcattcatttatgaaccctctaaaactatgtgtcatgccctttctattttatgtttattgccaggtagtttataagtgattaaagaatattgctagaaattatatttaattagatagataatgttaccatatcacttttgattcatttggcccccaatgtagtatgaaatcttgtaattaattttttttttttttttttttttttttggaaagagagtcttgctttgtcacccaggctgaagtgcagtggtgtgatctcggctcactcccacttctgcctcccaggctcaagtgatcctcctacctctgcctcctgagtatctggaactacgggcatgcaccagtatgcctggctaatttttaaattttttgtagagaccaggtttcatcatgttgcccaggctggtctcaaattcatgagctcaagtgatctacccaccttggcttcccaaagtgttaggattacaggcacaagccaccatggcctgtgatgagaatttttaagaaaagccattttatcaaatatttcatttaactaaaacacctttaattcagaaagcattatgtctattctaaaagtgtttatatggattaaatagacataaacaattggcagaggaaaaaacatagtactcactaacaatagtatttgtagaaattttgaagccatggttaaaaaaagagaaatttgagggacaatgtaaatacatgcagtaataatgctttcttagcaaaattcgcatctttagtctcctgtcaccttattgctttgtaaagaaacatcttgatcccagtcataaaagtcatttagacttataaactcattaatgtttactagcagttgcaatctgatttcttctcctaaactactttaaaaatagtctaaggaaaaaagcttttaaaaaccaacatcagctttatctcttacacctcacgtaatacttacaaatcttattaataaagcactcaggacaatctgatacactacaaaatttaaaataatacagaattgtttcaaataataattgcatccttctataaaatttgccttagaatagttttaatttttattataaatgcagccatagttgttgatctttaagcaatcttgactctctttgtttttgccactttataaaatgtagacaaatctgatagccaaggtaaataccagaattagggtaaagcaaagatagttttgtttttttgtactttacatcctccagattgtcaaacaggcaacatacacacattcaatttcagaagaatgagagagagaagtaacaaaagaaaaaaaactccagacccaatgattattactccaagaatatagatctttgtctaagcaatcttcttcagaatattagtagttatagaactctcagtatatttttatcatcttcacaaagttatttttctgtaaactaaaggtttgcctaaattgagataagctcctttaaattttaatttattttttagttgggtatgagcatttacagtgacagaagaagttctggttttggcaactttggaagtagctccccaactttgggacatgtacgtgttgtctgtatgatgactcagctgtggtctggtgctattatcacataatgttctatctttgaatattggaaacaagaaatttgcaacagctcaacctagcaaatttcttctgattttgttttcatctttcctttcaacaaaaattaacttaaatttcctaaaacagccttcaggtctttttttaatcttgatcatctactaaggctcttgggccctgggaatgtctgagaaggtgcactcagtaattcatgtgtaggaatagttgaaaaagttatcttcaggcctttcgggagttctgtagttggatgtaggtgacagctttatcaactacagtattcagtgaacatcagggaagcttaaaacccctgattatagctgcttttttaacggcttcgtttttcttctgtactccagaaagaaatgattctactcacagaattttacagttgtgtgtggtttttttggttgctttaatgctttgtattattttgtttttactaagaagtttttacatgtaaagcaagtgtaattgtatttacattgaactttgaaagattttcttcctcataatgtaaagaaaaggtaaataagatcaactgcatacctatgctattattttgctatgtagtttattatgacggcccatgctgctttcatattatttgaattttattgcccctgctttctctaggactttattaactttgatatagtgcatctatactcatccatgtaaatgattttgaagaacaaaacaattgacagattttgctttacaatatctgtgatttttgtttcatacctttgtccatctttcaatctttgtaaacagacctagttctttattgcgtagaccttataatcccttaataccctgattctaaactgaatgagctttaaaagtgcctgttaaacaaatagtataaaggatacaataatttaaaatttctttacagttacaagtttttaggtgatggaagtagaattcctaaaatatagattactcttgtgtcattttccccctaatctttaagtgttatcttcttataaatgaaaccacgggggtttttcttgtgattatagtatttcattatttgagtatgtaaacatgatgatgatggtgttacagaattaacagtagcagaggaatcgctctgagtcaaaaacagccttcatcatgatcaatagcacaattgttttatgtctgtaaggcatttctcataggactatatttggtcatcctggtagcttttggaaacacatgttttgtctcacagtatttgtagaccactgttggtggtggggtgagcatcatcaacactatcttaacccatacccttccagcctcatcaaattagaagtgaatgattggcagtggagagaggttttcagtgaaaccattcttgataatgtagggctggaaaaattcacaggtacgttaccatggtaacagtgttttcatcgtgatgacctgatttactaagaaaaagtcttcaaataagtctatgacatgattaaataagagatttaaggaaagggaaaagacaaaaacaaaacacctgaaagacattccagtcaagcccagtgcttctataatagacgccccaaggtatggtgagaattatttctgattcaacactttcattccctcacctgttaaagtagtaaacctttaaaagaaagcttttaaattaaaattttcagctacttgggaggctgaggcgggaccatcgcttaaagccaggaatttgagataagcctgggaaacataacaaaaccccatctctaaaaaaaaaaaaaaggcaaaattagctgggcgtggcatgtagttacagctatatgggaggatcccttgagttcaggggttcgagactgcagtgagctatgatcacgccactgcacttcagcctggatgacagggcaagactctgtctctaaaaacaaaaataataatagtagttataaaaatatgttttaaataacttaaaactttatataacagcctgtttcttaaataccatgcaaataatttcggagaaagtaagttatggtaatttttataaatgacttcacatttacaatgctggtgtttttattggttaaattagatttctcaatagctatttttaaaaactgcaataggaaggactgtctattgtattttttagaaacaagctggtttctacaatattattcacgttttttaaacagcatcattgaacctgcacataaaaggttaaatgtttgcagaccattcttttttgcctcaaagatcagagacaaattactatttttattttacatttccttgatgaggataatgataaacagctgtcatttcagtgcttcaactgcaaagaaccttattgcaatcctataatttaaacaaagaaaaaatatagtcatacacaatatacatacagaaaagagcacaatggagaatttggttagaactggggttagagaaaaggaagtgttgctctctgcaattactcacgtaaaagaaaaattccatttatatgcatttttcccgttcatcttagacattggtagaaggggcagtttactgcttctttttttctaaaatgaggaaataaatcaaatttgcatactgaactctgtgactccccatcatgtccactgtattatcagaatagttaagatttgcatgtcactacatgtctgcaagtatttccaaaagctaagaagaatttcaaattgttttactgattatttactaaagcctctcaattttttttaatgctaagaattaaaccagagttctctattcactctgacactttgttttctaattgcatctggtttcaaaaagtgaaagtcagtgtcttttgcttattttgatatgcaaaaaagtgaagcatggttacatgttaagaaagctgtaaaatggggaaatttagtgtttctatatgaaaatgtggatgctaatataattttcctggtgtttcatattcctcgaggtgaatgtaacaagttatttattctgcttttctcctttagctcaattatttattttttataactatcagtactttaaggaatttttctagaaactctctttatgttctggtttcttaatacctaaggaaaaaattgacttaaaataatatttatctaacatttattgaacaaatttcagttctcagagcttgaatatattcttatatgggttgacaattacgatgatacccctgtcctaaggttgtgctacagatctatataaagtacatagcacagtacctggaatacaatatttgctcaataaatgttcctgggaagtggtagtaggtttatgctgaaatgccattacctggtactgctaaacacaacggcaaaatctaaaatccaagaatgttttagatcagagagacaaatggaattgtgttgtattcctaatggaggcttatatttctttatatagaagatgttttcttcagaaagctgtaggtcatcatctgctctcattgatatatatcatatatatatatatatatatatatatatttcataatcactttatcatcctcattatcatcaagttgtagtagctcctaactcctcaacttggaatttctctggtctgtgctttctcttacaagtaggctttcctggaggccctaaatgcactggagcctcagaaatgtcctcatactgtagtcccaaatcatgaggtcatgctctcaggactgggaaatgagttgagcatgcattattttaatgtgttttttagaacaatagacatttctgagtgacagaagcctatataaatgattagaaccaattctatcaatattgttgattttgtggcccatcaatatgcttttcacacaagcatattgattcaaaggaaaggcttatcatttaatatccagtaaagctatttagcacagtgctatgcctagaactgattggatgattgaaaatcaaagtatgtacatttccaaagaaaagcacttcgtgtctacatggaagcaataaattatttccccattttacattcataattaaatctttccaaatgctagaaagtagccagaccactaacaataatacctgtgtcatgttctggggcttagatggttcaagctgacttgaaatggagaccatttgttctaaattgatttcaatgccaagccaataggtcagcccttaatgatgaagaagccattccagctcagcctctggtggataagccaacattaattaactcaagtctcatagtataggaaacagatgcttttctcatgttgcacaaataaattctttgtgtatagatgtgttctgttttattcaaagaataacaagttggaagtaataattgtaagtttttcacaatggagccagtctttagtagtgatgacagaagcatgaatttacgtaacaaattccagcaagtgcatggaagaataaattatcttctatatctcttattttggcttcaggcagccctacaaaatttagctttgaatgtgggaggatccaaatgctgatccatcccagagcagacctagaagtgccagaacaataccaaggttatttctaatctatagcttccctggagactcctctcagaggtttacatttgcatcatatgtttggattcaattctttggccagcttgcaaatggcttaagattagattgttctctggaggtatgttgttaggtacactgtttatttggttattcatctcaaccttcattcagaattagaatacttacttgctttccctagaatgtggcaggctaaaaattgagtaataacggcaggttcccccatctcctttcagaaccagtggatgcataagataaaaatgttaccatctactgatataaactccaactatgctaatcagaagttgataatctgataacgactgacattttattttcttctgagtgaatatgagataatccatggtttgttttctcttcttttaggctgaaaatgatgagaatggacaagcagaaaacttttccatggacccacaattggagaggcaagtggagaccattcgcaacctcgtagactcctacatgtccattatcaacaaatgtatccgagatctaattccaaaaacaataatgcaccttatgatcaataacgtaagtgattataaactacctccatttaacttctaacccatccgagtgtggaagttgcacatattatcttcagcttctttgtgtattttctggatagttcaaataatattacccaggttcatcattttccattagacgtgatatgtgactgaccagtgaaagagaacttagggaagaaaacttaaaacttctagctataggactgaggtattccccattggctgtcttctagaagagtgtgagtttgctcacaataaagcaaaacaaaaacaccataatcctgggcatcatgtaaattaattgcaaaaccagcaaagaaaccagatgccctggctcctagactttgagactaaaggcaaaggatatatttgttcctatgcccatgcgtgtgcatgcatgtgcacacacatatataaaatatgttaatatgattattttcagcttctaaaatctatggaatgctattttaacctgggaaagggcttcttgctttattccctcggattaaaaactcagtgaattttatttttctaaggtaaggatgctataacctcaaatctgaaaatcctgcttgactagccatcaatgggtctaaataaccttttcaaggttatttatagtagtcagagtatgatacttaaattatgtttgatttagttcttttggtagttaactttttacagtacaaataataccacaagttatttgagaaatagtcttttagataagataggttataatgaggtgttttatagggggcttttctgaatcttgacaagtgagacaccaataattttattcctagttatcttctaaggacatctttttatttaatccaatgataaattatgagcattacttgtaagaaattaaaattagatggcaaagtactaaaaagagccccaaagtagaatttaggagaaatctgggttctaaatctggttctgctacagactctgttgacctaaggtgagtctctttcatgtgtctgtttcctccatatgtaaaatactaattgtagtaagtgtatctgacttagggatttgttccagaagatggtacaaatgaaagtactgtgaaaaatataattgtaagaaattaatatggctgcctatttaagaactgtaaatagcccttgttcatatttcatggttaatttcaaaattttatttctaaatacgacagtccgttcattgtccatgatctctgcattccttgactgtaagcaaccccaagcactcatgtgaacaatcttatttttaactaacactattttcatacacgtatgtattcaaacaaggttagctggatgctttgaagaatcagcaacaggtaagcaataaattagaaatgtgggaactatgaattgtattcttttgaccaatggctttctgtgtaacctaaagcaaatcatttcgcccctttgagttgaagtcagtttcttctaaaactacagtgaggtacctcacagagccatcagagattataataaaagtggctataagccatttagaaaaatataaagtactaaacaaatagtctgtgtatttttaaaattaccttcttcatttacttaaatgaattcaggttgttttgctgtggtatatccaggcacttgcttatttaaacattttcctgattaaggatcatttatcttttcactgtttcaccgagagtcattagtgctgccatcagttcaaacgctgctttgctctgcactatattaaatcatcagcacaggaaatagcacttcctgcctatagctgtgaggagtagcttgacacaaattagctaaaaggaaaaaaaaaaaaaacaaaaaacccctattgcaaatctatcctactttcaccttctcaagaaaaacatacacacatgcacacacatatgcgcacacacacacacacacacactgaaagaaagaaagaaagaaatgcaggggtagtttccctcactcttcactggtgtgttttcttgttttaatgaaatggctaaacctccacctacaggatattatcctcggaggtaaagttctgatagttgtcttgagagagacctcacataagagtcgtgagaaaggagacttcaattaagatctgatcaccaaggtcaaatcttgaagtaaaaactaataggaatgtggagaaggcgaaagtatcatgtagtgctgaattcttatgaaattgtggctttgtttgaaatttaactttttgtatctaccagaagttagttttacatatctagaatgactgcttttcttgggtattattttatgtgctttttaaacatatataaaaaggtatagttttatatataatacatatattttaaaattatatatgtataattctatatatgaaaaatatatatctcttttattaatgtagtcatattgtcgtggcatcttattgtacagaatgcccaagcctattttgttcattccacacgtgacctgttgagtccaaggaaactgaaacagtgaacacccagcactgtgccatctagatgtattgattttttaacttgattcaaagtgaagagatcttcaaatgaaagaactaataataaaatcacaacgagaaaactagtcttttgactcctaattctaaattctattcacttaaccctgctgcatctttaaatgagtttggatcaaaaagctaattgttcctccagaatcaataaatgcctaaaacacggtcctctatttcttcctggtctatcaaaagcggtgttctggcctttcctctttgaaatgggaatgaaaaagaatatgtttcggccttctgaaaaagaatatgtttcagccaacattcataaagttcagaatttggtgggcagtttcctttgaaagtttacattaagtgttctgccactcaaatctccatatggaattgtttaagaagtttaaagcctagcaataaatgccttgcctcagacatactgtaagcctttgtctattgaaatgcagcagctgtttcattacttaaacataccaggtaacagcagcacaaagaaatagcaagtttatgacagacggtctttctggacaggctacagtcaaagcagcagagttttgctcaggactttaaagctaacacacacataacaccccatggtaagcccatttggatggcctcttctctgtagctcaccccaccagaagttctccatcaaagaatgaagtggatccagctttattctaaaaatgtgttcggtgtggcaaagtggcacataattctgtttgaacctgtcagccaaccacatgttggatacccattattttccacagcttataaatgaagaaattgaggttctgagacattgacttgcccaagatcacacagctgggggtggcagagttaagactgaaatccaagtcttctcactcatagtctgatgttctcaccatttgaacattggataatgcacgtgacagggttaggaaactctaagtcagccctctccaactagaggactcctacccccacagggtattcatgagttattttcccagacagttaattttacttgaagatttaattaggatttgtttgaaggtgagaagcaatgtttgaaatctttctcatatttaagcaaacccagataatacaaaagagaatgtaaacgttcttaggaatttttaaaaaaaccaaatttgaaacatagagccatttcacactggagtgtgtgctgtagcctgcgcccctggacccctctggaggtccacatttactctccttggccattggcattttggtggaaaattagtaacatgtgccctagtttcaaaacttactgtaactttaatgcgtatgaagtaaagtgttattttaaatgttcattattttaggggaaagtacatcttaaataccagagctttatcctggcatttaaagcactgatttgtttccaccagccaggaattcagcacactgctcaagaaaaagatcacgactaggactccctaagtcccactctcttctcccctgcccccacctcccatcattgctccccgccaaggctaacactcttctgctttcttaaattgtagattagttttgcctgtttttgcacttgggaatcatatactatacgccttttgtgtctaacttcttttccttaacattacatttgtgagtcaaaggatgttactttttaaagcaggaaaacttccttggtctttagcagaattaaatccctgggaaaaggaaaggaggactaagcagatgtgagagaattgtgagatctcaaagatcacaaaattctaaccaagccccctccccaaaactaaacaaaattaaacttctcaattgaattttaatacatgtattgtgtgaatgagaggcatcaccgtgttccgtactgtgaccctccaattctagaaacaaagagattttaaggaaatggtctccttggtaactgaactgtaggaaactgtaggaaaaccctagaaatgtctcttctatttgtgaagggtttaaaatggtctcagtcatagaaaagaaggtttaagatccaaacatattacgggttgctagagaagggttaaagtaagagaggaaaacatgtggaacatttttaatgacctcacattcctttacactgagcagagcgacatggtgcagtaatgcctgtttatctagcctagagagtttgagctggaatgaggtttcatgtgtgagaacttttacaaaccatacagagatgtataggttataaggtgttataattaaaaacataaatattatttcagatctcaaatttaagtataatcactttgttatgttaggtgaagtattttctaaatgctatcatctaaaagggattcacttgacccctgattgtcatgcagaattcttgatttaaatatttgtaccagatttaaatgtctgtataccactggcatacagacttcccagaaagtccctgaagtgtctggaaactcccggaagtccccctaccttcattccaaactccaattttagtgtcacaaagctaggttagcagaaggagagaagagtatctctaaaattttgcttaaatgcaaaataaaaaatgttaacctctatgccctatttaactatgtcgcttgatacctgtactgttgcaacagctgtctattgttctcctgtctcgatgtacctaatgccaatgtagcctatagacagtaaaaatcacagcattttttggaaggggcactaactgtgtgctgggcatcatgctagacaacttgtattcattccttcctttaatcctcacaatacttgaggtagctctaccctcatttcacagatgaggaacctgagactcaaacagtttacattatttgcccaagaacagtaagtgttagaactagaacttaaatccacagcctatgctctgaatccactgtattgcacagtaggcaagttccagtgtgtcataattgctgtggaagattcaaggcacatctttggtcagaatgctgaaacaggcccttattttgcttcatggtttgacagttgattcttaattcagctctgctttaaatctattcttggaagaatcttcttttaaattgtatttaatagattctaagtgatattccagtaatatgtaaagtttctaaagagcttaacccaaccaatggtcaatgccaggaaaattgtctggttttgagttttgaattgcaccatgcatccaactgcatatacatacccaacagtgggagatttgtgcaaatatccatgattccctgcatacctgcaagtacatttagaagtgaatgcgtctgtaaggaagggaatgaaatattcctaaagccaaatttgctgccttccctctaaatctgactttcttttctgatgtttgagtttctattctcctactcatccaaatgtcaatgcttgagatgtctttggttgttcctttcttccttgcccttcacatcccaacagcaccaagttcagttcattattcccttataatgtcattgtatgtatccattttttatactactgcgttattaaatgaaacatttaccatcttatgaacgatctacaatagccttctaacagatttctttattttcactaccacccttgcaaagtctttttcaatgttagccagattaattttcctaaaactctcttttattgtttcacttacttgcttaaacgctttcgctggcccctcattgccaagcaaataaagttcaaacacttttccttggcattcaaggccttcgcatctgcctcaggattcctggccaaacttaccttccacaactatcgtgcataaacctctactccacagagggtttcctaaatacatcttgtgtattagattactttcacctttgaatcactcttggtttacaaaatatgtacagaaaacactttatttcaccacaataaacctttgatttagctgaattttttgattagtagaattatttacatgttttgatgcctttaaaacataatgaagctatgtgttttaggttcttgtcatctctgaattacaaatttaaccatatcctagaaatttggagcatctgacagctgttctgttatctgcctgattttttaacaattaaatatatacttgcgtttggcctttcttaaagatattcatgagtctagataagagttagctttctcatgtaacagagaaactgaaaaattcaaacggcttatttttactaggcttaagttaattgctgcactactgtaaaataatgatacttaaacaaaaatttacttttttaagcactcaatcacagtgagataatggggtaagggaatgggcaccggacttcaagtcagaaggttatggattcaactgaatgctgtgtgacctagcacaagatacttaaattcttggaacttgtttctgtatctataaaactggaatactaatacatgtttcttcagtgtgtgataagaattgtcatataacttatgaagccacttggtatataccatacttcatcgattctcacattcacttctttttatttaatatttctgaaatgaagatgcatcttatactcaatggcatcttgacatcctgtcaaagtttgattgatggtattttttttttgtctgaatagtcagcacatatgatagtagtgtttcttaaaatcactggtgtcttagagttgatgagatacagtagctggcgttcccactctcagtgttgtgcaccatattcatcctctccattttcatcctgcaacaaaatgcccctccccctgagactcccacatagtgttcatactttagtttgtttttatatattagctaactatgcaacctcatgtcagtccccatcactgttaactaacttctattgtaaacttctggaaaacagagtgcatctctttcacttgtttataaatcaacctgcatagttatataagattctgtatttaataaatattcacttactggtgctaatttcacttttgagacgacactgaaacttggcatctcaataattttccagtgattttggtaaaagctagggaaaggactgcgaatgccaaggaatggaaaacgtgtgattacataggtttcttcacatcactgttttctgttgaaaatactgcttcttacctcatagtaccttccctcttctataagccaaacagctccagacaatattgtgaaatgctcacaaagccagcaggccctgttctggtgatggctgggtttggccttcttctactcatctctatcatccttcagtgtggacagccaaaagacagagggaaactgttactgtcaccagtactggggatagagacaaaacaaaagtaaacagacgcttggtgcttcacttttcccagggtggactttggtggactttggtggactttgtccagactctgactgccacagccatgtttctacctccactcagtcactcatttattcccatttttatttctctgtggtgatctgacaggttaaagatttcataaattccgagctcctagcacagttgtattcttcagaggaccaaaataccctgatggaggaatctgctgagcaggctcagcgccgggatgagatgcttcgaatgtatcaagcactgaaagaagcccttgggataattggggacatcagcacagccaccgtgtccactccggcaccccctccagtggatgactcctggatacagcactctcgcaggtaagaagatggccccggccgggtgcggtggctcgctcctgtaatcccagcactttgagaggccgaggcgggcggatcacgaggtcaggagatcgagaccatcctggcgaacatagtgaaaccctgtctctactaaaaacataaaaaaaattagccgggcgtggtggcgggtgcctgtagtcccagctactcgggaggctgaggcaggagaatggtgtgaacccgggaggcagagcttgcagtgagccgagatcgtgcactgcactccagcctgggtgacagagcaagactccgtctcaaaaaaaaaaaagaagatggacccacccacaacccctgagccctgccacgcttgtccaatatcattttctgagagtgctttcctaaaccaagatggacctacagaaaaaggggaaaagatatttacattcaggagtaaggatcagattatactaactcccttaaaaatgcagcacagtgcatcctcacaatggaatgttatatagtcactaaaaagaacaagacagttctattaagtcctaaaatgaaaagataatccagttaacgggaagctttaaaaaaaagggaggttgtatgccaggcgcggtggctcacgcctgtattcccagcactttgggaggccgaggcaagcggatcacctaaggtcaggagtttgagaccaggctggccaacatagtgaaaccctgtccctactaaaaatacaaaaattagctgggggtggtggcgcacacctgtgatcccagctactcgggaggctgaggcaggagaatcgcttgaattcaggagtcagaggttgcagtgagccgagatcacgccactgcactccagcctgggtgacagagcgagactccgcctcaaagaaaaaaaaaaggaggttgtagaagactgtgttctatggtatacagaaaagcaatttatatatagagagagaaaatatatacttatacaaatgtagaatacagttaaaaaggatgcacaagaaacttctatagttgtttcaacagagtgaaggggtagggagaggaaaacttacttttctccatttacccttttatccctttgactttcatgacatgaattggacttattcagtcaaaaaataatttttaaaaagcaggaagttacaaaacatttttagagattaattcagacagaaaggaggagtgagcaaactatgatttctctttttcctcaggtcacctcctccaagccccacaacccaaaggaggccaacactaagtgctcccctcgcaaggcccacatccggccgaggaccagctcctgccattccctctcctggcccccactctggggctcctccagtcccattccgtccaggcccattacctcctttccccagcagcagtgactccttcggagcccctccacaagttccatctaggcctacgagggccccgcccagtgtcccaaggtaaggcatggagcagaaattgggggggtagtgcgccttggttctcttctcatagaatgacagacaaaatttatttgaaagagaaaattgcaaagatcttatcgtacgtgtttgcagttttcacaatgaacagagactataggaaaattgccaaccctgttatgccatttaaaaatcacttgtgatcattgaaatttctcatttatcaattggcacagactaaataggactaaagaacactccgtcccaatgaatgacattttggcagctattgggagaatttgagggctttgaaacaaaagagctatggaggattgtagcaagctgtgtgttctataggtcatgagagttccatggactaaagtcttgccttctccattatcaaaagaattcttgaaaaccactgacttagagaattttatccatctgccttctgaactgtgatccttatactcaattttaccaattttcatataggctgaataaatctggctgattgatctgcaattgtttttttaaaaactacacatagaaattttaatataggcatgattgttgtatacagtcactaatcatatataagatagatcattgtacatctgaataatacgtgttgacaattataagtggattttcaggcttaattgtgaaacaatatagctaataaataatggacctagaaacacacatagttggagctgtagtctcaccttcatatacttacagtcaaaatatacacaatgaatagaatcagagatttttaaggtataaagtactaaggtttttttccccctcaaaatcagaaatataaagaggaaagaaaattagcccatatataaagttaatttttaaaaaattcaattcagagaattaaaatatttatatactccatgaaggaatatctgactgtatatgaaccataaaaacagatgtgacttctacccatccctgaagcctgagccaccttgccaactgattatggcacttacgttttattttaatcttcaagttgttaagcgtaatgaagagaagagaagaagggggatcttaagctagtacacagagggtggtacagcaagaataggcaggagatttgcagtcagaagacctgggttactgaaggtcttgggcaactcatttaactctgagacgggagttctttatctatgaaacagggagaactcaataaggttgttccccagatcatatgacatgaggtatttgaaagagtttgatacactgtaaagactacagttgttaccactgttatcattttggtcctaagcaaagaggatatatacacactctcaatccaattttttttctctaaattcaatagacttggcttataaattatttggaatggtgctaaatttctagtaatagcagtactagcaatagccaacatttattgtgccctcaatattactaggcattgccctaagaactttgtatatacatttttgtttaaagctcacaacaaataggttgttatccacattttacagatgaggcagtgaggttaaacagcttgcccaaggctgctcagccagtccctagtggagctggactttaatcccatgcagtctgcttccaaagccatttcctgaccatgaccccagggtttttcagcctcatcagtactgacgtttttgttgtggagggctgtcctgtgtattgtaagatgtttagcagcatccctcccctctaccctctagatttcagttgcagtccccagttgtgaccactaaaaatatctgtagacactcccaatgtcccttaggggagtaaaattcctctccacgtgagaaccactgcactgtagtattcaaaagaattcccttccatgtaaaaccatgaatttccgcattgagccttgctacaagcaagatccaatttattattttagaaaacctcaaattgactaggaaagtgtctgccattgtaccaggaaggtattgaggccattggaagaggaagagttgagagtgggaaggctggagtgccatgcaggagctacttttgtctgtctagctgtgagaaaaaaccagagcaaactggtggtgcctgtcctggggaatgaacatgcatgttctgcctgcttgcttgactgctttacctgtgggtttcagatgagctagcttgccagtacccttcagaaaaatcaacttttgaatgctaagctgacttgttaagcagggtggagttgccgttagtattttccagctcgcacgaacaaggcagccggatgagaatgagtagcccgagctggatggccggcacatgggcagcagggcttaatgagactacattagggaatttataggatgacagttgccttatttgaaatttctagaatactctcaagttagaaccagactttacttgatctggccatgcaaagagtcccaaatttaaaacagaaatgaaagtacagggtaaaagaggaaagtttgttgttttgtgctgagccttcaagtttctgtgctggttcagcgctttgggagggaaatcccggggaagggggctgggggaggggtggtcacctgagagagggcaagaaagactctgtcaggatccccatgcctgttaaatccagctttagatggagagttctgaccacataaagtctgtttttaataaaagccagagcaggaatcctaccaaatacaagccagaaatggggtttaagatttcaaaaaaagaaaggaagagagaacgagagaaagaaagaaattgagagaagcgcttgttgaaacttcaccttattctgtttgtttaatatattctatttcccctctgtgctttgcctccattttctctatcaaaaacttagaaagttgaaatgccattatccatcatctctgggaaaacaaccctttgttttcagagaaggaagtttgattttttttttcaagttttttactttcttaagggtcctttctcctcttgtatctgaaaccagaaacctataacatgacaagacagcacaaaaggtgtcccgccagctccctgttgggctttaatattacaaaggcaataactgaacttttagagacaagagattctgccattcagcatgggcttgtgcatagttttcttctggataattcacgacttcattagcaagttatgatcttgacttttaagagcatatatacttttatgttaacgccattcaaaggtaatcaaagcacacttgcaattgtacagaaaccatgagtgttctgcttttaaaaaatatatattattgtatctttccattccaatataaaaggagaggaaggagagaggtggtggagtcatttttggcccagcttttctcagctgctcaagctgttctggtttatgtgcatggagcctttcagttagggagctggaaatattgcaaactacatgcctgttttaattaattccacttgaactagagaagcatctctatcccaaagagattcactagtatgtatgcttctgtcattggtaacttgagtatacacaaatcagtgatttgtggaacattttctattgccagaatatctggattgtcacctcccctctcacctccactcaacttctctgaaggggctaaatgctgtttgaaaatccaatccagtgtgtatttatttacttaacaagatgatcttaaacagacatcaccacctctttagggttcctattctcttaattgaagatcctgatcttcatcagacattaactttagagctgatgtaactattttcagatatagcttcttaaaattagttaattgggaatcacagtctttgacattaacggaacaaattcactgaatccgagtgtgtttttcctggcaataatgaactctggcattatttcactcatttgtcttcttccctttccttggactaagctattttgcaatagtcaaaaggggataagggtgggaggaagggtctccaaccaagcaagaagaaacttttttttttaacctcatcactcaatattcaagtactttttttgaccacccttgttcaccaagtatgatggtttctctttaaaaagacaaaactgaatcattcgaaaggatttgggttttactccagctcatcaaaatgacataaacacaatatggaaaccaagaaatgctcccttgaaggagtctctggtgagccccttagtgaagctgatgtcccaccctgcaagggcagtcccagagtagcatcaagattattccagagtgtctcactcatgcccatcccatgacttaggtggcttccttgacttatgtggcacactttaagagtttcattgtaatcccacattttcagtaatttattacaaatcgaccatgccaaaagatttattaatccttctacataggcaatcaatgcatgcatattcttttctttacaaagacaaaagccatttaatcctccttataatttagtttaattctgtttcaaatgtttgaccttgatggcctgcagtgctctatctcttttatgtattttacatattgttataactgacaattaatataaagtccctttcacttagggatacgatctccttgtttcggttttgtagccagtcccccaaattttgcatgaggacaaattcacgattcttatgagtgtgtctttgaatcccttacgtcaaggtttggtgccatgaaggatgaagctgctgagccctgaagtcgtgggctaagggtacacggacaattaagcaacttaagtgactagcctgtgtctgattcccctgcagtcatgtactgaaaacctcctgacttactgtcttttcaacagccctctaaaagtctgacttcttttagcagctgaatgtcatttggacaaatgaggaactcatcttgtgacctctgatgtcagccaggagctttctatttttctcaccatcctccccctttaaaaaacaaatacataaatttatcattgggcattgtgatttttcatggaacagtttttatttttagcaactggctttcaaagcaaggaaagatgtttttttaagcataattactaagaatagaaacaactttgaggtgttctttttgattcttaatatttaaggtgtctcatgacatttgaagtctctaaatgtcattaatcatttgttgcaggtttaatatgagttgtcatgatgcttaatatactttaatgaaaatagaattttggccacatgctgttcattaaagaaaatatccaatttaatataagtccctcaattaaaaatcccatcaaaagccttgttccaatttcaccatgattctggctataacacaattatttcattggagtgaatcaatggttaatgtcaaagtttttaattcttcaagtcttggtttcaatctggtttaagtgaaagtaaaattagtttggtggtttccttcttgagtcttgcaaacttgagtctaccttacacaaacatctccatcctgccacggttcggatgactggcagtctgtttaggcgaggcccagaaacagaaagcaagtcttgtgaaagtcagaatctgggagctttgcagatgcgtcaaggtagccttcagattgcctctctgttttcaatgtgtcccctatctcactcttccaaacatcctatgctgtaagagggtaaaaggaaaaggaaaataagaaaggatctacataaggcaaagtacaagtaacataaatgcagacagcagcagtaaatataacaatatgctgctgttagcccagtggtaactggcattaagctaaccaaacacaactgcttccacatcccatgacaaataatagcaaatagctctgtcattgttctctttggggctctaaattgttgaagcttcagccattgcagggaaagccttcctgagtttcaggggaccaagccctgccctgagtttcacctgactgatagaggaaaacagccaagacaggagtctggcagagaagccactggccagtgaaaaatgcacagtagaggattattattcttcctgcaaccagtcagtagcaaattgtcaccagttggaatctgctgaatattcctatatacaagttaatgttagctcaaagaaaggggggtttaaaaaaaaaagttttgcccagtgtaagcagatacagatttgtagatgacacacaagctagtacttctatttcatcactgcacttcgttgtttccctcacttgtaagaaaagaatgatttttacagggaaaccttcacattcagacagttcttgttatttcttgttttaacgacgtcaacgattcatggcatgacattgctcatagctctttcacctctaaattttatccaagcaacaaattagaagaaaggactgctggggaacttcttccttctttctgtgaaagatcagaagcaatttttttttttttttttttgaggcggagtctctatcacccaggctggagtgcagtggcgtggtctcggctcactgcaacccctgcctcctggcttcaagcgattctcctgcctcagcctcctgagtagctgggattacaggcgtgcaccaccacatccagctaatttttgtattttgagtagagatagggtttcaccatgttgcccaggttggtctcaaactcctgacctcaggtgatccacccaccacagcctcccagagtgctgggattacagccatgagccaccacaccaggcctagaagcaaaatttaaataacgtttactagagttgctttagccaataagagccaggaaattaaaaatgaaaatgtaaatgcttcatctttcactcagaaacatgccttaaatgcctacctccagcaatgtaagaaaaacattgaggatttagctgagagtttgatggcttttgcttgcctgtcataacttcattgctgctcaaagggagaattttaaaacactcgacattgaaatcctttagcttaccattgccaatgtattgtaagtgttgtcggggggaacccctgaatctaaacatatatttacacccttaagttgccaaattaaatccatctggcttaccaaatgctgtcgccaaaagactgttacactgttggtgtggccagtattttaaatgtgggggatgggagggcagtgttgaaaggcactagatttgatgatagaatttacatgtgcattgatgccacattaagtatttacatcaagtttagatcccatggcaactctgaccaagaaagaattcctacacaaggcaagaagtctaaagccgctaggtatttgcgccgtctcctcatggcactttttgccctgtgactgcttttcaggcatcacagccacgcaataggcaaaaccacaaatagcaaacactctaatttcttgaattattttttaactattcccataagcactaggaaatgcccactcctgttttctggtcgaagttatcagctcatgtgaatcatagaaagaataaattctacccaaggacctgaaaatatgttaagtcaaaatggcaagtagcaaaattcgcagtcactcataatccatagcaaggtagggtcttcctaacttcagttgcttagagacatgtaaaattccaaatgttcataaaatcaactttttctcctattgggaattaatttaaacattagaaaacaggaaaaggtataagcactcttcttaaatgtgcaagttgatatgaaatttagaaataagccccattccttccctgcttctttggtagaagggctaatggactaactaagagagagaataagctaaaagtctggatagccacaactaaatacaccaccacaggagaatccctcagcttctatggtaattttgaaactaagagaaaataagacagcatgagaaggcattatgctgctttaaatatgacttgggaatggtcttattttacaatcaaatataccacttgcttccatcatgtaaatattaccagtatttagtttcagattttcatgaggtaacattatctaaatttactgttcgtctgtatatttaaatatataacattcatttgcagtatttcatttatctcaaaagattagtatatatctcatctagaatgagacctcttatgagaataggagatgagaaagacttttaaaggcatttcgcagtccagagagtctgcaatgaaattattccactcaggaatgggtatttatgtaagatacattctgtaccatgtgtatttttttaagtttatattagcattattctcaaagccaattttaagagtgaatgaaattgttcccttaagtaaatctacccttaagtagtatcatgctcaagggcctacaccagaaagtctgccccactgctctcgctataataccattcactgaggaaaagctgtaagaactgaggaaaatgtctacttacttcttaaaacaacgagaattgctttttgcttctcagtagtgttggaaactattttaataactaaaataataaaacttcatgtgaggcaaattccaccttaattattgccctttggggtggaaaaattaaggaaacattagtaaatgtgttaaacagaaaaaccactgcagtaatttcccgccaaatacctgggtctaaagtcaaaataaaatctgtgctctgcgtatgatttgtatgaaagcagacttatagttttagctctaacaatagtaccacttaggactaagatgaatggaccagaaaaacccctgtgactcatcagtagactgtgattagcttacttaagtgttctacagttcagttcgggaatctttaatgaaggatattgatataattgcttgattcattttaatatttcaaacactctaaattactccatcactatcttaataattaatgcatgaaaactcatacttacattgaaaattcattttaaagcacaatatctttgaataaacccattgaaatagtgtttctggtgtttgcttaaaactttggtgtataactgattacatcttatagatttcattttttttttcctggtattttcctcttctaacttaggacctttttgccatatgtggctatttgatgtatattgttcagtcacgatcttctaggtgactgaaaaacgcatggagttactcatgccaataattattgctactgaattgttccaaagtctcccttcctgcagaaaaataagtttcagtaaaatattctagaggattacaagttatctttgcagttcataaatactttcataggctccattgatattcacagttttcagttagaatgttatttttattgcaaagtttgcatttatatttcttttctgtggattgcttaccacttattaaaattaaaatgcattttaaggtgaaacattatgtacctagaatactgaaggtagcactgaccattgtctttagctcagaaagcaatgttgaattggaaaagcaagatttgagaatattcctctttactgcattgtcattgcactctagtccttctgatttcccttgtttctcagatgatccctacgcccaattatacagaacagtcttcctctagttacttatatcaaacacttgcctgctagctgtgtttggcaggccagcaggatgaggtaataatcagaagaaaatgttctggtttattggcctcatccacgtacaacattattcaaaatagttctctgtgggtgagaacagagttgctttgagatcccctggtctaatgttctgtagtagtgaggaggaacaaaactgtaaacttttttgatctcttctagaataatggtaaggtaaatgatatctgcttggcccatcctttcagtaatgtttacaggcagttagatgtatgtgaaaatgagagcctttcatttataaacattttggctttactctttccaagtccagccatcttcttacgtacagcctccatggtcagtacagcagtgttttcctaaaagcatattttgtgaacaatttctccaggatgatggtagtttttgtaagacagatgcctaaaagacatatggttttcatagattttccgtctagactagctttatttagtgacttttggtctgaattggtctagttaaagtttctgtaggagcttgtataaaaatttaaaatgtgggtgtaccattaaggtgtaaaacaaaagtttgacttcttgttggcaagagattaaaacggattggttgaaaatttccttcatgttaagtaattctgatcatcttatatgcctactcatccattccacccctacaacactgtccaaaatggaaaggcttaccctaaaaatcccataactgttaaattcatatactcctcactgttcctgagtaaattctttgtgttccagtttatgtgtgtatgttagaaagccctaattctttctgcagactctttacatggcccaggggacatattattctttacccttttagcaccaatttttacaaacacagcatttctctcatttaaaaaaagcgtctgacaagccgctgagtagaagcgactgaacctttaggagtttcatagtgccttcaaccaacaatgaaaattctgtttttcaaggcgtttcaaattcttgagccagtgtcaaagactcatttagaaacaatatgacatgttcagaggaaaagaattacatctagtcttgcccagaaatcatccttttgctccctcttttgtaagagctaatactgcagaccagtcccatcttaactgcatcagaaagaggaggctcgtggaagggaggaaatgtgggccgttctgtctccacgagtgtcattgcttggcttccttggcttctcacgaagcatttaattggacttagtcacatatttgttcactgacatggcagcctgcaaagcacaatgcctctctgtttttctctgtttgctttaaaaaattttgtttttaaaatttgagctctaaagcatgttagagctcctcctgctggatttaaaaaaaaataactgggacgattaataaatggtaattctttttcttcatatttaccacctgggctaatagaagtgacagaagcctatcatgtggtgcacttaaaactgaccttttaattcatcaggtatgaaggtcaggcagaaagaaaatgttggtgctacacaactcatctctcagtcttcaaattcctcatgctctttttttttgctgttgttaaaaaaaaaaaaaggaaaaggaaaggttatttttctgtgagtatttctagttacatagttaccccaagtcacatccccatgcttgaaaggttcttgctccctctcagaaagggacaaaaagtcttttctatcttcccaaagcagaaatgaattgtgcagtcatacagagattcgaagtgttgcctttttcctccctatcctttcttctttttccttcttcctcctgatttcctcctccttctcagaagcggacacttgcctcgcccagtagctagttctcagcacctcctttctgcctcctccttcccctaaatggtggcagttggcctctccctctcctggtgcctgaagtgggagtgacgagaagggtcagaaaaaggtttaccccattcaccatcagtgggagtaggtttctacagcacataagtttctggaggtctctttaggaataagagagaaaggaggggggatagaagggagataggaagaaaggagggaaggagggaaggggcaggaaaggagggaaggagggaaggggcaggacaggagaaaaggaggaaaggaaggagcaaaggaaaaaaaatcacttgtaaatctctgtaaaaccacttcctttctctgcatgctttctcacactgtatccctcttgccttctgcttctctgcgtttcttttagctctttcctcccccaagtttataatctcaatgatatagtacaaaggccaaaatacttaaaagttaatctcggaaagtaatgctttttagaaatcatattttaatacaactaaaaatccttcatgttacctgtttcatgactttattaggacttgggacaaaacaagtcatttggtatttgtgataaagaataagacaacccttgatttctcaaacttcagtactttctggctttctttcctttgcacatacctttcctattcctggaatgctagtccccttaactttccgtactttctggaagtccttccaacctcctagcctccttccaactctaagctaggactccagatgtttctgaaactcctgaagcaaaaattttagcataatcctactgtggtcatagttaacttgtctctctccatctcaacaagaaacttcttcagggcagtgactctttatttctgtatctctacctcttaacacagtacctagtacataagtagggcttactgaggggatgaaggaatataaaatgaattgacttgcaagcctcaatcaaaatttattttgaaactagcccgatacttattttaaaaaccaacttaaacacactttcttgttctattctattgaaaagcttgcctgagtgaatgttgtaaaattctttttacagatcataaactgaggagagttaatgtgggtaaatcatcctttaagctgcttttttgccacaaccacagaagtgggtatattaggcaccatgcctatgggtgaaatccaagtcagatatgtaggacaatgtaaagaaagtgtgacaaagcagattatattaccatttatgtcacaggctaatttatacaggatattacctgtttgtatcatcaaaaaattgtgaactatttttctccctatgttctgatttcaaattccatgaattgattcatattttcccaatgacatacattataaaatcatgggttcattttcacaggggaaagaaatgctggctctaatacactgcaagaatcatattagagaattccttaaatcctttaagtgggctccaagttctgtgttctttccagcatctactgtaaactattcttggatagtattggctcattctgttgctacagccaaaaattccaaaaatatgctgaatagcaccctatagtatttcttacagtaaattataaaatattatcttccatgtggacaaaatcatgactgttatagcatttttctgactttaaataaatgcccaaaataagaagtagagtgcaaatacatcgctgaaatttaaaatacagtgtcccaaaatttgttctcttagagcagacattcacaagaagaagtaggggtcctgcatcacagctgccttccattttacctagaagtgtgctccaacccgatttatctttgggcccattcacactcattgatctaccgcttgggacactgccctcagcaggtgctgtggaaagctgcaagaggcgtaggagtaatcttggttcatagaaggttttgaatgttgttcagatgataagatatgcatgcacgcctcaaacttcaaaaaaaatgatgcaagcattaaatgattcaagagggtcattgagaagtaaagcatttcaattcctgaaaacatagaaaatggtttttgtagataaaacccttcattttttatcataaataagtttaaaaagggtgggcaagttgatatcagattctagtggcccttggaaacctgggatgtataactctctcatgatcctagatgtatgtaaactaaattttgagacagttatattttaaactttcaattataatttacaagtaaatcttgcaatgtaaaagaagctactgcatatcctttttatgcaaataactacccttttaagcagatatcttctctaaaaatgtcagtctttgtatatctttttgaaggctttcttttaatttgggtccacctaactacttatgctggacttcaatcctaccctctccaaagattagaatttggaatgcacagagatgcttacctatttattttcataagcaaatacaagcttccctaagcaagtagtagttattcttctgataatgactaacaacaacgacaacaaacactgtagtccagtatcttggtctttataacataaggctaaaactgctttcacccatgcttaagtctaattcctaaaggtatcaaagtgtttctacaagcatttcttcatccttcttaagatttccagcactttctctttttgtttttactttatctggcaagtaaattgaattgctaataaagcaaagtaaaaatcttttttttactgaacagtggtttcaaagcatagtcccaggaccagcagcatctgggaacttattagaaatatcccaccacattagaaatgttgggtggcacccagcaacctgtgttttaacaaggcttccagggaactctgatgcaaggtccaatttgagaaccattgccaagagcatatcaatctaactgcccaatagaaaaaattctgcactgaaagtcatgagaccttagtgcaagcacaggaaaggaagaagactgaactacataggcccattctggcttaaaaatttaccagtcagataattcctacttcccatcctatggagaaataagggcagggacagaaaggccaatccatttcacaaatcagtattatgctagctggaagcaagaagctagaggaaaggtggttttcacacccaccccacaaactgatacaccaaagcagtttgcccttattgaggtctcccttaactcctgttaaaatgggcctcatatcatgaacactcaggaccagctaatccaaagaagagcagatgaaattttagttcttctgttcttaaaagacaataaaataaggcaagaaaacaatgatgcattcttctctcttatcggtaaagccagtttctcccccacaatgccacccaccctgcatgagcatttgactttcttacaaaatttgtcattgtccacaatactgcaaacagtccatccctgcagctacaaatacaacttcaagtattacttcttcccctttgatttgaaagaagaaacatggctcttctatgtaaccataaaccgcccacatacaacacagtgtttcaataaacactaagtgatacaagatgctccatttcaatataatgccttacttaacgaagctcattactaaacaaagcaactgaggaaaatttggtacaaaacaataactttgctttccccaaaacaaactgtcttgtgaggtgaatgcctttggaaactctttgaatggttaggaactggaccaatgaaatgaactttaacagtaaactttaaatgttttctggtgttgaagttagcaaacatctttagcattgcatattaagaaaattcaccctaaattgctttctagtacagttgtatatacagatttttgttgttactgttttagaaaaaataaataaaatgtttatttcttctgcaaggtttagtgaggagctctttaggatttttaatgactaagtacatatttgggttcctttaactgcaactaggcatatttccaagatatcatagttactttgagagaacatgaacattttatcttttattattttaattattaattcaccatctagctatgcagtgcctattaaatgcatgtccctagggacatccttaaagagctcataatgaataagttatcctgattgactgatttatttggaaaaaaatacaatactatgaaccacaggccatgctaagttatgggatatggtagtgaataagactaacaatagacctggcacatagcagaaccatatgttctcctcatctcctgtcttgacttctttctgcaattgcctgctactattgtgctcttgtcccagccacatggtccaaggattaaagcagatattaatgagaatttactgtgccataagagtacttaagtctttctattctctatccacaccattgaatttttcccttcaatcgccatcatttaagttccaatttcactcattatagacctacattcctacttccaagttttatatgcagcagttacaatcatgtttgccatcactttgaccacattattgtattttcagacttcccagagtgtattctcagactccgaattacaaaattttgccccacttttccacttaaaatgaagtactataataaagctactttcatatttgttttattccactcatcttccattctgaatagatgctgagctctttaaagtcatgtagcatgaagcagtccacatattagatgctcaataaataatctatgcaatatataactggaagtcttgacatagatcatctagtctgattgtacaatttggcaactggagctagaatccacattttctaacttctgatccaggactctttctatgtaaacatagtatctcaaatataagcttctgataaatgccttaaaagtgtagcatccttggcctcgctagacctactcaccttgatctagcctaaactctagcctggctaaatatcttgtttaggcacttttcagtcatttcttcatttgtccattattcaacaaatacttaaccactgctttctaatcacattgtaccaaatgctgaatacacataataaatgcaaaatatgtggtttcttttctcaaggaattttgaatctatttgggggacactggtaataatctagtaaataaatacataatcacaagtagggttacgtgctacgagagacacaaacatgaagtcataggggaaggcagaggaagtcaggaaaactatgggatggtccagaaggactgaggaataacagttaagccaagaacaaaaggatcaagagaagtcagtttcattcctttctctcttggctacaagccttgatccaagctatcacatattcatgaaacgatttccaatccatcatgccatgctgtatcctacttctcactgaatttgtagtctaaaatcaactttttatttaatgaaatcacctaattaattccattatcaaaacttctggtagaatttccctccttaaagctcaaattctggccagttctctcctcccaccagccaactggttaattgctaagaatacatttccataggttacatgattatttgacaaactccctgagggcagggggcttattatttggtatttattccaaatatctactaaagaactgagcagttagatactttagagtcaccaaggatctcaatcctacatgtcactttagctacttttttttttttgccatggccatgatttactcacaaatatccttgtatttataagaccaatgaatatcacaagcattcattagttatttcttgattctaggaggaactttcattcattcagttatcaaacattcagtgactgaatgacaagcagtgagctagataccacagttacatgaagatgattaagagacagctcatttctcatcagtgaagataacatataagcctaattagagttcagtgtgatgactaataatagagatttgttgagatgctatacaaacaactgtatcaggagaggggaaggcaggtcagggaaggcttcactgaagtaagtcttaaatgattagttagtagtctcagaagatgaccaaaatgacattgagaatgtaattgcatgtaacaccatgctaaacactgtatgaaacaagttaagtgggtgtgacctgcgcccttcagaaacttcctatcaaagaagaaaattatgcagattcaagattcaggacataagttaaacatatatggccattttaaatgaaaataaggctgggtaccatggctcacacctgtaattccagtgctttgtacctccccaaagaaagatttcctttgaagcctcttacacatttttcaagtgcatgaggtaaaaggaattctactaatatctatgagtttgtgcctaaatagttaatattttcaccattaatcaacaatatctctcctgctttgatttttccttgatcgtgtaatttaattttatagttccatgatttttcaacaactatttttttcaaaactatttttcaaaactatttttcataatagttttcttaaatttttctaacttcacttcttcatacctgagaaaggacattcaatttgatcaatatagagtttctaatacagaagaaaaatttatgactataattccagaaggagtctttctgaaaaaatcagttgcagagttttatcaaaaagaaacatttcaatttgtagactttgtcaaatttgggggggtaaaaaaatgactacccaagataccatatatgaagtcaagtacacaaatacactaaaaaaacttattaatatatttaggaaataaatgtagaagcttgaggaataaataagtaataaataatattacttggtaatgttgagactctcaaatacagtaatatttcattatctaaagtacgtttgcttagtaaactcagctaccagaaacatcattaccaactagaaagtgagtaatactactaataccaatactaaagtctttaagacccaaaataggaactagagctcctgcaatttaaacaggcactcaacactgagcctatttacacttgctacagagaactctaaagacttgcttttctgatttttagtgctctgtaaattacaagcataatatagaacaaattggagaaagtcaaaaaggcaatgagaagtgataataatatcctgaaagaaaaaggaaaattatatgtgagaaataaaaattcaaaagccatcattgtctgaaacagtataccttattagttcctgagttcattctatgtaattattatattctattggctaagatatgtgcagtacgtttcagatggctttcaaatagtttcatatttcttattagtattggaaggaatgacttcagttttgagaaagatttgcatatgaaaaaagacgtaattttcattaaaactactagataaatgaaaggtgacaatgttaaaatcattacagatcataaccacttctgctggcctgtatgtgcatgagcatgtgtgtaatggctctttctcagtgtccttggaacaatgttctgctagatattctacttgtttctttacctttctctttttctctttctagccggagaccacccccatcaccaactcgtcccactataatccgcccactagaatcctccctgttagactaaacgaagtgtctggcatggcaattaatcactaatgaattatgcgaaagcaacatatttgataaccgttgcagtaaatcatgagtagtcgcatgtgtggacatcagtaggcaagtaaccagttttactaatgcattcatcgctcatcttcattgctcatggtatgtcaaacctttggggtttgactcagaaactgctaaccttttagaggctttatatgttgtactgaccaaggtaggtttgtatagcagccctatactttggggatcatttgcctaccatggcatatatttgaaattgctttggacaagttttctaggctatctaccaggtagctcattaaacgtaattcttcagatatgagatagtgggcttagacctaagccatacatatttcttttcccacattctgtttaggatgacagtaattctgttgtctaccattaatgctactacctactccataattgcctatttagctcctcttttcttcctttttatttcataagactgctaggaagtgattttttaaaattaggactccttaagaataaacttttccagaagcacgaggtagtttgcaaaggaaaagtctgcactgtttgctctaaagagcttctcctcattccaatgtgttttgcttcatgctagaagcatatgcaacagtgaataaaagcttctttttttgttaatcagtcaataaatttggctaattagtttcagagttcaaggaagaagcaaaatatcacatctctagaagtgttgggaaaaatataatttctttctttacttatattcacctcatggtaggttatattgaaggctgacatggagaatgtttacttttctatttggcatagctaactacactttgatactaactccagttttactattattattttggttggaaaaaaaattcactctttacgtgctaatttgtaatcttgttttgtaagaatttatcctacccttgaaacaggctcagtgtaactgtatatccattctaggctttcttaataaatcttgaggctatgggataatcacatttaaagaatggttcctgaaatgaagtcagtagaaatggcatgggataagagcagagctcacacttttacagttgcagtatttcaaagtccctatccaggtcactccagaaaagggtattgaaacgttgaaatctaaagcaaatttgcaatttcttaagatttctaaaatttaccagaacagtttagcctgggggttaatagttaagtcttgaggctaagttttggactaccaaggaccagatgattcacatgtaggaaacagccagaagccaactggaattttgtgtgctaactgttcccagacagcagagcaagtattcactgagtaggggtgtcccatgacactatttcatattctacagaagtaaatcaggtttcaccaactgaaatgtctccctttgaaagtagcaaacatgatttgtatgttaacttaactttaatttcctgtgtagtttacacccagagcagatactcataaagtataaagtaaaaacttttaaccattattaaacagagaacttgccatgttgagtgccattgtattgaacttattctaaaggcttatgctaacccatttataattggtaaaaatcagaaaatacaagatttacataaaggtcatttcaacttttaaggttaccagtgattgtataaaaacatcacaatcctaaatcctctcgtatctcaccccaaaccccaaactgggggaaaaaaagttaactctttgtgaatggaaccaatgtgcaagatacatactgcatttttaaaatagtgtctcagctaaatggaaaactgttaagcaaacatccatagtaaaacaaataatcttcagtgagatctttttataaaacttcttgtttttaggattccctttgcttcttcctttgaattctctaaaataggcagctaacggattatatacttcagggtttggctttgtgctaaatgtggttttgtgttttgctgtatttcaaaattttccttctgttaaaggaaaatattgtgaataaccactggtgtgttcttagatcagcacaaaccatgtcaaaaaaaattggagatttttttccaattttccttccactgatcttaggcagtaataaacaatggcatttgtcatctttggcacttgcttttagattatagtcccacagttgcactgccccaattgtctacctttgtgggtacatttttgttctttactcctaagttatttctcatagaacccagcctactctagaatttcagcagtgacattggagaatatttttaatttgctgcagtactatgtcatattattagtatgaatctcatttcccaaagggtttgtattctgctaaaaggagatgccaatgttgaatgaagtctgaaactctagtatgtgcatagtttgacgtgcagcatgcacaccaggccttaagatgggaatgtagcttaatgattttctgtttcccataccatttctaatcttttgtgtaattttctcttaactgattgctctgatattgtaaacacaatagatgtagctctatcatgtctagcataatttaaaaaatcagtgtttttaggatttgggaaaataaactgtaaatgtttatttgataggtaaatatagttttattgtcacatgctaaatattgcatgcatattgactaattggaataaccatttactcaattatggacagcttattgaaatagtattgatttagaaaaagtatattgcatttctaaaaaacatctaccaaggttactcgtctgaatattgcttttagccgtgttttataacatagacgagcagtagggtctgtttattagcaaatttcctatttgttccaatacaaactcactttattctaaagtatattaatgaaaccagttcctgtgatgtaactgtaagccttctcgacttagacttaaaaagtggtcacatagattaattttgtgactttttagtatagactgtagccataattctcaaatatgaaatgggacctaataccagtatgtgataaatgttgatgttttctgtgtacaaacacattttctatgcatgtgtctctgtgtatatggcatatacctagtaagtatgtttctgtaagtatgtgtattttatgtccatttgagtaggtaggtaggttttaaaaatactagttaaaatgccacaagcatgagtgtgattgtatgtgcactgtgtgtatatatataaatatatgtatatgtatggttgtaaatatctatgtatacatgtacttagtatgtgtggtatcaggatattttttaaactgtgataatacaacagatagctttgaatgatctgccataacatgtggtaacaatagttcatttctcataacatatatgaggtatacaaaattttctaactccagattgtagtcattttgagaggtacaaagctcataattaccatgacaacatggtaatgtccatagacatttgtatctgaatccacaagaagatctgaatctaagaaggaattacctttgacaatatttttcggtaagaagtaaaacctctggagacctatctttaagatctctaattggaattataaattatttttggattgctgagctgaatcttaaaaagccaagttgatatacatagtcatttttcctctatggtagaagtaaaaaaaaaaaaaaaggacatagcaacattaaagtagtggatttttctgagtaaatttgctgaaaatataagagagaagctatctaataccttggaggtaggtcatccactttttcaggtaaacatttttcatttggcaaatggcataattatttgaaagtgacaggaatctcctcagaatgaagaataaagcctactaggtctctaactgttgaactcatgaaagaagatagtgtatgagacttaagccatgagttttgtatcatttcaattagaagactactagctgtgagctcagagtttaatgtaaatgaatctagatgattttgaagaaatgattattcgttcaccagatcactcattgtacattctaaaaagctcaaatgagtcttctagatactcttactcatcctgtctggttgctatgtttaaaattatgtggtgctgtgtaggtgaaactttaagaatatttttgaagcatatgtaatatatgcactgctatttgtgtgtgtgtgtgtgtctttgtatatatgtaagaatgtgtgtatgtgtgagagcaagagagaggaaactcaaagaggagtgtttgtcttaagacctgttcatactggtatattggtgagacttctcacttctggttggaggtttcacatatggctcaactcaagtcattaatctctttttaatttttactcttgaattccttaaacttcgctcattatgaaatgttttaaaattatgacaaaaattactctgtctaaccacttgccttgtctgctaccagtttgttaaaaattattccccccaaccagtaattccaccagtactacttgatttgtgttatatttcctatgtacatgtacagcctttgttttgcttgcttgtctatttttactttcccttttttgggtcaaatttttcttttgctttgtttgaagaaggaatatacagaagtaaaatcttgtcttctctgctgattctttaattaatatgagccggatactttccactgtcttcttggcactttcaggatttcttaatgctgatatatggactcttagaatggaatttttgaagaaaaatctcaaagcctgtatcgttcttgaaggtcacatgtacctattgtgaaaatgtgaagctgtatttctgaagctgaaataaattataacatttgaaggaccccttttcctcattcttgtatatatttgagtcatgtctatgcctttcagtaatacctgagacttctaaatatttatagctcttttgattaaattgtcccagagttaccaaagtaaagaatgatagcattttccatttctgtcattaatttggagaaagatgggatttttaaagggaacaaattggataaatcaaaggcaggagagtgggagacattgtgtttctgatttgatgtcattattggaatcgattgacgaacacaaaccttagcaggagggtatgatgtgacagttaccaagaagcaccatgacagtttgctgttgaaaatgaagcatttattttagaaattctgggaagtggaaggaggaaagatggtgtgcccaaatgttaggtccacagaaggcatttcttatagcaaatattttagctcctgacccaacaattagcctctgttatttgttcactgggcatagacaggacaatttgcccctttcagtttccccagttttttgtttgtttgtttgtttttgagacggagtttcgctcttgcccaggctgaagtgcagtggcactatctcggctcactgcaagctccgcctcccgggttcacgccattctcctgcctcagcctcctgaggaactgggactacaggcgcccgccaccacgcccggctaattttttttgtaatttagtagagacggggtttcaccatgttagccaggatggtctcgatctcttgacctcgtgatctgcccgcctcggcttcccaaagtgctgggattacaggtgtgagccaccgcacccggcccagtttccccagttttaagagaatgtattcagaaaatgaaagaatgacacaactttgtcctaattttgagtttccagagaatagaggaagactctctattacaagagttttgatgacaagtcccttatcaattgacatattcccagattgtgccatctaaatgcagaagacaagaaggtgataggaggagagagatgttgatttattttctttctgcgatcagggcatgctcattgtgaaaagatgaactggacagattgttgtgtgaatttactctttcctgtgggatttctttttcatatctatacattttccatgagtggaacatctgtaccttcaaaggaagcttcttactggaagaaagattctggatgcgaatcatgctgtatacctgtgttctgtttgtttgttttgttttaactgcatgattttgaagtatgttaatcatatattcagaatagtttctaaaggtaatttccaaaaacaaagaaacttattgtaactatttggcaattttccattggtgttttaaatagctctggcattggtgtaaacatatgctcaatctgtttccaagatttttgtttttctgatgggacctttaaatttcatattgagaaacgtgtttagtatttggtttagagtgacctcaaactttgcttccaagcacttcaacacacacctggcatagccacttttcagacctgttactagtattattttatattatggcagcctaataattagaatacatacaagagatattggctaaaactacaaccttaattcaaaatttctcaaagtgcattccatgaaatcttaataagttttacatacacatacaccaatggttttttggccaaatatgcttgagaaataatgactaaaaatcaaatgtttctttattgaaagacttcacagaaaccttaaaatcagactgcattgtgaatctccaagagatgagtaatgtctacatatttctcagacttatttgaccatagaacatctcacagatctagtgtcctgaggcacatgccttaggaaactgcttcagtggctttaagccaaaggaaaagacattgagtgtgatttcctcagtacagactctcactaacaaaaagttggatgataaaatcaaatgtactactcaggaggctgaggcaggaggatcagttcagcccaagagtttgagaccagattggcaacacagcaagacctcatctctaaaaaaaaaaaaaaaaaaagttgtttgttttaattagctgggcatggtggctcatgcctgtagttccagctaccggagaggctgaggcaggaggatcagttcagcccaagagtttgagaccggattggcaacacagcaagacctcatctctaaaaaaaaaaaaaaaaaagttgtttgttttaattagctggacatggtggctcatgcctgtagttccagctaccggagaggctgaggcaggaggatcacttgagcccaggagtttgagactgcagtgaactgtgatcgtgccactgcattccagcctgaggagtggaatgggaccccaccatctcttaaaaaagaaaaagaccaaatgtaagagcaacaagagctctcaactaagggcaattcatctggagctctggtactttgtcaaaggagtatctgactcttaaggaggaaagtcacattggaacaggtagcacaaaagcagtttagagacatacatgcattgagtcttaatgagacttatgaaggattcagataattttataccttaccttttctctctgactctccaaaaaagggattctttaaattacctccatgagattattgtgaaggaaggcatccaggttgatctaagattaatcatcagagaagaatgttgaagactattcctattgcctttctttcctccctttcccaagccttcaggctcactcactgctctgggttattaacttacctaaaggatgggcaaagaaagcaaacagagcattttttgtgagtttttttttttttttttttttttgagacagagtctcactctgttgcccaggctgcaatgcagtggtgtgatcttggctcactgcaacttccacctcccaagttcaagtgattcttatgcctcagcctccccagtagctaggattacaggcgtgtgccaccatgcctggctaatttttgcatttttagtagagacggcatttcaccacattggccaggctggtctcgaactcctgacctcaagtgatccgcccacctcagcttcccaaagtgctgggattacaggcatgagccactgcacctggccttttttgtgagattttaacagaaaagaaaaaagctataaggaagacctcctcagagatctggccagaggaatgtcaccataagaccaaatttcagcgttgacatagagccaaaagaatgagggtaattcatcattcttgttaataattgagtcttttatatataaattacacccatgttccagatacagctttccaatctcctttacctgatttggccaaaacatgctgctttgaagttatttttcagaatgcttaagaaaatataacctgaaattatagtcttgattaggtaaatttgcttatatgttgaatactaggatggtgagcttaagaatttgttagcaactcagtattccaatttagtactgcaactttcatatgggagtggcaattgtatgaggtacctttgtagctctacatgtaaaaagcccaaatatttgcagcacttgcctttaagcatttcggcactgtgtaagtcatataaaaattatgcaaaagaaagagcaaaaaccccaactgcccatatccttaaaagaactaattttgacccagtaaatggtatcatcaacaacaatgctttttcagcaatgacaggaagggtagatacagtaaagtgaagatgaaaagaaaaagctgtctgaggatataaatgtcaccctgatgtttcaagcaaacattctagctgtcagtggaatatattccaagacataaagtttctgatcctgtttctggatcagaacaccaaactagctcaaacaggaaagtgttttggcatatgctaacagaatgtcgcttcagcactgtggacttgctgttcagtttaatggcccacctccccaccctgctgaggtcattaaagtgttctaaagccccttcagaactcgaaaatagtttctgttttctgggcaggtgataaatctcattgagctcgacagaaatttaattacactttcttcatgaaaacaccagggatacccattacctggatctctaaagctaaagccttgcagaccccctagcccctgccccggccctgaagttgaaaggttaggtaccaataacaagttctccatcatttaaatggatgggaggcctctttagtgtagtcagcttaaactggactgaaggaaaattgattttggactttggggaagctaagatcattttttaccactgcccagaaatacaccagtcagtttggctccactaacatctcatagaaaatgaaaaagaagtttttctgtttttgtttttgttttttttttatagacttcattgctccactcacaagcaagaataagatgtgtaacaagaataagatggaagtgagcgttgttgaacacctggataagaagtcaaagagagtagggtcttgagataatctcaccattctacagcttcctataatgttgagttcattaatggtttggttagaaaggggaaattaaagtgtagacttctgccaaaaaccagagggaaagctttatttggcctgctgttttcctacttacaaagctgttcattgcaatgtagggtttactgtattttctctagctgcaaatcatctccctgctgaacacaagaaaggctgatgtcaaatgaagcacaacttggaccctcatttcattatccataggtctgatgaaatgcaagccagcctagggaaatggagaaagatccagcagaccagatttcatttaccttgggcccacttcagaacaaatcagaaatacagttatacctagctcttagacagagggaaatcctagaaaatcctggggttgccatggaccagaccttgcctcctagtttccctaggcctgaatccaggctattacacaccaggactactcacctggagcaaattcttatttacaaatcctttttttctgagatcaacctctggcattctctgcattgtgattacattgctcatttgatctcttgacaccttctaatttacctcacttaaaaaaaatttaacctgccattggctacatcaactccctctccccctatggagatttcacaacattcattgaaatctttggaaataactgagtttcacaaaatcagggttgaaaatcaaatatacaagttataaaggtatttggctcggggactagtcccagttctcctgaataagagtgcatggatttatcattccatggtgcaaaataagaagctttttgagtgagctcaaatggctcatacctagaacattgctagtagccaggaaaagtcctgggaactgctaacttagctatgtgatgtcccttcatttcctttgcatgtctgcatgtttttgtgtgtgatttgaatttgacttttgtgagctatttttgcatgctattatttgggtttattttataatttaaacattgttttcttcctctgcatctgtgtctttctttttgttattttgttttgttttgttttgtttttactaggcgaccccctcctgcagttccaggacgaccatcctaacccccatcattcatctccttttgtttccaacaacatgtctatccatggtatttaaaagcttttcatttgcactatatgtcgtatgtacataaaaacttttatttttcatccatgtgtataataaaaacaaagtttattctatataaaaatgaagtgtgttctgtttctttttttaaagaagacctaaatttaaaaaagaatttgtttcaactaaaacaaggtaaggtgaatatattatgtgttcctctaagaagcttaattcaaaagttcttaaagcattgtgatttaagacggtctttggtagagactaataatctaccttcaagtgaaatttctgtccaatagaagaataaaaagaaaaagaaaatttatggatgtctagaaaaaacacagaagactaaataattccaatccacctccaggaatcccatttttacttattattgcaccaaaatattttttcctattattgtttttctaaacactcttaagggagataaaatgtaagatcatagaagaaactgtagagcaaaaacacataaacctcataaattctatatggcaaatgtaagggcgaaaaaccacatcattcagaataaaagtacaaggcaaggaaatgttgccaccttgagaagaaagactcttcatgatgtcagtaaagcactagaaaaatggagtccatataagtttgaaggaatagagaactttttattcctctatcctcaaatggtaattctaacactaaaattttaatctataattttttaacaagcatcccaaagatgtatccaaataaaatgtttattatttaggtaatatagtacattccaccaaatatgtgatctgaagccttcccaaaggtttaagatttaattcagaattttattttttgaaaatttatgtggcctaaaatagaacttgaaagtagtccttctcaaatgagatcacttctgaatgtgctccccttcagcatattaagatgacagaaaactacatgacaagagagtcaaaaaaatcattcatcagttctatttacttcacatctgacctaggcaagccctggcaaaggaggtatttggaagatgtgggcaggaacccccagttgtaaaagggagagtcctcattagtaatgctgtttcttcggaccacaaatttttttaaggactgagttctccactcaaaaatgaaaaatcagtttcttggtttaaaatgttcatatggcatgttacattattttaattgtatccccggtccagtgactaccatttaaaatcagtgataactaagaaagttcaaaggctccaaaccaaggcatcaactgaagctcatgtatagcaggaaggaggtgacttgatgtaaaatagcacatagcatgcagtcttttgtcctttccttcccctccagtccaggcatttgatttttaaatcaatattcttagtggatagcattcttcatcccaatagacaaaaatgtacctagatgatttcataccacctccccaaatgaaaaccgaagttgtcaaagagaaggttttcttcaattcattttttaaaagtgtttggtacttttccactttgtcttaaacatggacttatttttatatgcagtgt

SEQ ID NO: 166 - DNA, 112629 bp, Homo sapiens
  source 1..112629: mol_type = genomic DNA
gagaccggccaccagctgtgtgaatttactcctgagtaatgagcagggggtccaaagccttggtttggttttgtcactaattactaatttggtttattcaataggtgaggttcactgtcccattttttttccccaatggaagccccctggccaagacagacctggatgtcaatttgatttcagttggggagaataggtagggggagttgagggctgacttgactggtgcctagagttgcaggtcagtatcacaggttgctaacagaagaatcttttgacatcaccaggggcaaaagagatagaacactacctgctagaggagagcacctgctaaaagaaacctcctccttttcctgcctcagcacctagcaacttctgggattgacagtctacctgcaatcagggcaacagaggtaaatagctgcacgggctgactccacaaagtcctgaaccctgggagaagagtgctgggagccccctggcgtgtgtgtgtgtgtgtgagtgcattcattatgcatcagtacagaaatatgctcctgtgtatgcgtgtgagattgactgattggtgtggggtttaggtctgcagtggggaccgaggctcagcacactaagcctgcttcccccactccccaccccataatatttcttaaacatgaccctatctatgtatttatagagcgcctatcactgtaggccccatctttctagggacgtggacttggggccatgtgcttgccgacacacctcccagctctaccagtcccaggaggtgccatcccccctcccattataaaatatatatctctatatgccacatatctacaccccatctacccaggcaagcacctgcccgtcgggccctcaccctggagccaacaatgccatcccttcctactactgacgccaggccgcctgccttgtaggaagtagaacaaagtgttgagcacttggggctccaggtgctgctgactcgaggtaagagcacagctatcatcagaccaagtactagaaaagaaatacacaccactccaatcacacacacaaggagagagacggccggtcctccctccagccctgacacacccgactcaagaggaggggaagtagaagagaagagtgacaagcccagaaggcagaccttggggactccctggccgcccagctgtcaccatgcccagtggcccacctggcccgaggggtgggagccagggcaccagagccaccgctaactcagaagcaccctgctcccgcaccttggtttgaaacctaaagggaagggtgttgggtttttgttttcttaaagaaaatcttaaaacaaacataattataaccagaaccataagaataattataataaaaggtgtcatcagcctcccagtataaaactgcagcctttggagatgaccaaaaacatcacattccaggggccgggagccgccttgtgcacagaggggtggatggtgggggcctcataaaagaacacacaaaaggcgacttagacaggaaagcaccagtacgttttgtatgtttttttatttgctccaggtggggttttgactgtcactttcccacactctggattagttctgatcccaccacaaggagccctcgaattggctaaagtgagaaactgggcctgaagactccgtaccctctgccatcttgccgagggagtctccttttagaaaacaatcaaagggttattgcatgagtctggatgaatcccactctcagctgtccacgggcccgaccacctcatctagccccctttttggcagggagaacctggctcccaagttctcctccttcacttcgttacaaaccaaggggaagagcccaccgtgagaacgcgccatctgcaagctgtctccctttctccatccttggtgaaaccctttgcgcagaaggcaacgtggaagctgatgtttttactcatctcgctgtttgaaagcaccattatgaagtcgggttgtacagtagttaacagtaccttttatatatatatctcatatctatcatatatatataaactgtaaacaagaggtaacagcggcttctagaaactgattttcttcaaggtttcctgtgtggtaggcacctgaaatactgtagaaaaatgtcttgtgtggtgttctcgtctccctgctgctaactgggttctgttttgcgtgaccaggaatggtgctggcacgacagctcagtggctgggagggaatgctgccgcctgagtgtctctctctttccgtcccctgcttgtgctcctatctgatcaggctagagacaacaaaaaaaagatatatagtaaaaaaaaaaacccaaaaaaaaaaaacaaaaaacaaaaaaaaaaacaacccaatatatagatttctatagaatttccttttttcctctctcccacctttcctctgcaaggtattgttactattttttgttactgatttttgctgcaataaccttcttgtttcagtcacagcaagaaacaaaacccaaacaaacagaaaacccctctgaaaagagtagaaaataaaaggtctgaccgaaaaaaaagggaagggggaggaagggaagggagcttggttttgtttttaaataggactgaagaataacattgaaaaatcaggagatgatgtccaacccttttcgcaaggcaaagccctccggtatttccgcctctgtggtttttgttttaaattcctttttctcttctgggtgctgatacttctctccatcctcatgttcttggtgttttattatgttttgtgttttttgtttgtttgtttaactttgtgtcgctacctcagtttgcccccatgtcccttacacacacgcaaaatactccttcagcggagcgaagaggtggcggatgactggcacgctccatgaccggcccagcagtctctgcctcgccaagcggctcatgttggagacgtcagtatagtggactgggaaaccaaataccctgggggagaaaaggcagagagggcagggtgagtgctggccagaccaggctgcccggaagccgtctaaccacacagcaggacccggaggaccagcagccacccgaagtgcagggacaggggcactcacacccaccaactcctctgacgcctgcttagttctgccgaatcttctgtcctttataaacaacccggcactcagatcaccaaccatgtgccaggcactgtgctggtttctgtgaccttaaaggtagtaaggtcatcactgcctagagtttcacaacccagcagaaataagagtaattttgaacaatccctcagaaatacctccaggacacactctctagttctcctctcctgcagggttagctcggcaacgtacacctggagtctgcatgtaacgaacacgtagccctagcatcctccccatcaagagcagggaaggcgaaaaaggagccgaactcctgcctgacttcagaagctgaaggatttcctgtttgctctggttgtttgtgtaaatggtctctttgtctggctaaatcctagttacactcagagaacaagaaggtcatccagccccgaaagtcccatttgcatcaaatcagggtgttgaggctgcgaggtctgcctggccctatgctggcttggtttacaaaagacctataaaattggcaccacaagttaaggtcctgtcactgcagtggttccctgggggatcagcagggtctctgggagacaaggcagcaggggatttcctagactcctcttttttttttttttccctttgagatggaatctctctgttgcacaggctggagcacagtggcgcaatctcggctcactgcaacctccacctcccaggttcaagcgattctcctgtctcagcctcctgagtagctgggactacaggcacccgccaccacacccagctaatttttgtatttttagtagagacggggtttcgccatgttggccaggctggtctcgaactcctgacctcaggtgatccacccgcctcggcctcccaaagtgctgggattataggcatgagccactgctcctggcccctagactcctcttacttgggaccagccttaaaatacccaggagcctggggtgtcaggagtccaccccaggagtctgccatgttgggaaatgcttgataaaacccactgttcccaggacgtttgtggaaaacaagtcaggtgggaaaggcagaggacccccgcagcaagcacagcaatcagaacagccacaccgcagccagatgccagcacaacccgggtacctttccatttcagtgcaccataagatgtcctctttctcattcatgaagacaggaaaatgctggtctttgccctgctttatggagtttgacctcgtagtaatggtcctcactttgctgaactagatgaagaggagaaaagaggaataagcacgaattcattcaccagccaacactggtcatgcgtctaccaaatatgccaggtactcgccaaaccctgacagggcctggtccacccagggggctgggtatggctctgagtgagcagagttcgcagggcaggagcctccacagaccccacagcctcacttttcttcctacttggaggtcacctggccaatcttagatccatctagccacagacttttttttttttttttgagacggagtctcgctctgtcacccaggctggactgcagtggtgcgatctcagctcactgtaacctccacctcccgggttcaagcgattctaatgcctcagactcctgagtagctgggactacaggcgcccgccaccatgcctggctaatttttatatttttagtcagacagggtttcaccgtgtcggccaggctggtctcaaactcctgacctcaggtgatccgcctgcctcggcctcccaaagtattgggattataggcgtgagccaccgcacccggcctagccacagactttagaagtagaagctgtagccactgtactttccaagtcttccaaagaattagttctttcagagatggagtaacttgtaggctaaaggatgccaagttactgaggggctcaaagatgccctcggagctgccagtggttctgaatgctggaacctgctgacacagaacccagtgccccaggtagtcactccgggagattccagctccagagagaaatggagcttccacatcacaggaggctgctttgagggcttttgtaataggttttggccaaaaaatttaaaaatgaaaaaaaagccacagcacaaccaggtcttggtaaagactcctcagtgtctaccgggggtgatgggcgacactcaccagggaggaagggctgaaggccagcagccctgggccctcctctggctgccctgctgcatgaccctgcaccgtctcctaaattgcattctccacactagctggagaagcaggcgggacaaggccctggccaccgctccacctcatcctgcccttccttctccctgccccccagcagaggttctagacgctggagctgaccttggctatcctgccatgctccagacactcctgcagctccagcttatcattcacagtggatgccaacggcctaggaggcagaagagagactgtaacaacagaaacctggataacagcgggaagggccccagctgcacgactcccctccctcccccagcagccactagttcacagggtaagagccccttccccaaatcacgcacacacgtcataactctcttcaaactccccgcaaacacacgaacacacactgcagccatgcaaagacacaaatccaccaagcgttaatccttaaaggtaaattcaaaagtggtctcaaattgtgaacaggcagataacacctagcagaaaaagaaaaaaaaagcacagctatctttacatcagttagtctaaaatacactgagctttaagcgtcccactgcgaagcaagctttgggggtgacaatgttctgtatcttgatttgtggtgattgttacacgggtgtgtccactggatgaaattaatcaaaccgcaagccttaaatgtactgctttaaaagactaaattctgggccaggcgcagtggctcatgcctgcaatcccagccctttggaaggctgaggcaggcgggtcacctgaggtcaggagtttgagtccatcctgatcaacatggtgaaacccggtctctactaatataaaaattagccagacgtggtggcaggtgcctgtaatcccagctactcgggaggctgaggcaggagaatcgcttgaacctgggaggcggaggctgcagtgagccaggatggcaccactgcactccagcctgggcgacagagcaagactctgtctccaaaaaaaaaaaaaaccagacttaaattctgcagttccctaaagaccaaaaattctgtgacattaaatatgtcacttctcagggtgcaggccacataactgactggctgtccccttcaacgctgaccttttctgacatgtaaggatatttaaggaaggcttccctgagcactggctccaggatctcagtgtgggaaccacggggcctgcagtcaaatcaggtgctcgacagatgtccccgactctttatgcgtgcactgcccagtcggccctgcatgcaggacctctgctcctcctagaagctcagagtttagtattttagagttgaaagaagcaggcgagaaatcccacaggaccaaggtctgtcgggagacactgagtggttccatgaaaatactggacctcattagcccatccatttcccaatatgcacatgtatcttgggaactctcgggggacagtttcaggccagctgccccaatgccccatctccttcccctcaacaagccctcgatagcaactctaccaaacatgtatgagatggggaaggtcctacaacctcatgggaatagcaaggagggagattatttgaccgaggccaggtgaaatgatgtctcctagttataccaagtataccaagcagcccaccatggaggtttaacacccatgactcagaacactctggaaaacgcttccctccacaatggacagggactgagcggctctcagcatgcttttgaattgccaactctggacaatttatttcgcctaaaaagcctttttataatgccagttttataactgatgaaatgaattttcttcattcctagatattaaaatctttatctgtgtaacctaactgaagaaaatctctccaaaaaaggacctgaagccaacaaagtgtgtgattagtaaaattaagttaagcagaaccctgaacttgcatgcagccgctgcaagattccctctcctggaacaggctgtggccacaactccccttcccagccccaaagccatgccccatggctttgcctcaggagaatctaagaaccagagggctcgggacacatcaccaatgtcagaaaaccaactacctaactcagcagcacaggactcttctttggtataaagagagtacttttaaaggtcctgctttaagaccactagttgttggtttcagacgagtattttctataccctgactcctcttcctcctcaaggaaaaggaaataaggaacatggcagagcagctagtcattcagcagaggccggccagagagggcccggctcaggggcttccccactatgggtcatcccacctgcagtcccagcccacagccccccaggcccaggagctttcaccaacctgttcataccgggaaggttaccccagaagtagcgggccctgtgtgcagctgacacttctttggcatcaatcatcacagggttggactacaaaacaggagacggtttgaagatgagccaaggaggagcatgaaacagcgccggcatgctgctggggtcgagccttaaagcctcaaagcctcttacttctctctcaggagccacacactgggctagcctgcagcctccaggagaagctggaattacacctagccacattccacaagctgtcactggaacgttctagatcagcattgtccaaatgaacttctgcgatggtgggttgtcctctacactgttcaattcagtggccactagcccactagtacaggtggctattttgtacctaaaatgaggccaatgtgattgaggagctgaatggttaatgttaatgtaaacagccgcatgtggctggtggctaccatattgcacagtgctgctctagactacccagaggctgggagagcccaggctccagcgagtatgggtgtgtttaccatgagccctgattagaactcaaacagacgcctgctcacacttacagtcagaacaccagctcacagtgtgacccaccccaagactcaggagcacaggtgggctcaagctcccagaagggccactccaagcacgcctctggcagcagaagccctctgcacgcggctcagacttggctcagggttaaacggggactcacatgataaggaatgaaaactgagctaagtcttgttttcttctcaggtgcctgtcatggtaccagggagtgaggataggcccttcttgctcagggaaaactgattttgtcctctcaaagatcctggtgtgtaacaaacaccatacagaatacccaaccccaggagtctggcaccccacctgattgagtgacaggtccttcaaccccggaggtccacacccacaatgccacctcttagagtgagaccactggttctttccgaggtaggcctctaaccctgcttcctccctttctatccaggaagcctggggcttcccaaacaggccccttgcaaagcagaagtcaccagtccccagctccacaatgcagatgagacaggatgaagcagcagtccaaggtagaagccattagtgagctggccaaaccaaggttgctggctatacctcgagaaatcgcgagatgtccctcttgtcactaacgcccatggccaccacattctcaaagagccagaagaaggggcgatcatctccctccttgggccgcgcatcatgcaggaggcggtagaactcaaagaagagccggccagtgccctctgagaggtcggaagagaaagccatcagctggggctgtctgcataggacagtggtgtggctcgggcacggggagggcacgggaagacagggtcatcgggaatagctgtcccagggcagaaatatccaaggaggaagcctatgtgcggaagcaccagctgagaaggtggaggggacaggatggtacctaccgtagaggcccttgcgagcagggttgacgatggagaggtcattgcagggactgcccccaatcaccagatcgaatgggccccactcctggatctgggaggataaaggcaacgtgatgggcctgctgtccagggacagaggcagacaggaagaaagagaaattatctgtgaacttggcaaagaagtcctttgacacgaaagagaggagacccagctgctctgcaggctcacgaccctagctgcaaccatggacaagtcctaaacaagaacgggaccaagttggatcatttcttaggccaatggggaaactagtatcacccaggcaggcaacacagccacccactgggaaggtgacccaagtggacggctgagtctgaaggtacctggcatgctgagtgtcttaggcagggtgtctgggccatgtgaatgtcctccagttgcccttcaggactccagagggcctgtagtcatgcttaagggaagaccctgcctgagcctcccagatatggaagctgataaagctatttgccaaaagtattgggaggacaggaacctctctctaatccaaagagctctactagaaactgtccagaaaccagcccagggagtagccagagctcaagtaggcactatgttgcccaagctagtcttaaacccctggcctcaagggattctcctaccttggcctcccaaagtgctggcattataggcatgagccaccatgcctagcccaaattcccatttcaatttgccctttaccctctcaagacagaggacaaatggaagataaggagaaaaagaggctggggcaaagggtgaagagaaagagggcaaatgaacaaaatgaaaggaggcaagggctgcctccaggtgctgagtgtgcagggaggggaagacgggctgcgccccacagcatggacatacatgcttctgtgtgacgctgcggacgtccccgacgtacatgatcttcccctggtgccgcaccatgcccaccgtgatggagtcctcacacacctccgaggcaatgtagcggtccacctgaatgcccaagtccttcagcaccaggagccctgcaccagccagcagacagcaccgttacttggagccatctccctggcaccctggtctcggcaggtgagcctgctggccaacaggacccatggggtcagctgtaggcccaagtcctatcttttccctgaagatgccttaaatcctttctggatccaactggagtatccatagtaaggacatcgaggctctgtctcatgcctcgtttggcctatctggaaggcagtcaaagctgcagaaaactgaccggagagtacatggttccaggatccaggaagaatcacagctgactttttgggggccttttctttgttgttgtccgtctacaacttggtccttccataccctcttatcacctcctgctacaattctaccccaccctttgactcaacctgaatgttccctgctccacaaaggtttcataaatgccctgccccacccagtagcccctggaatcaccgccccctccgctatgagtccccagctctgtgcatcccttgcctccccatcagagcagtttccattcctcactcagccctctcgtggattgcaaaggctcttccagacagaggaggcctccttcattgtgcttcccccgagctaaccacacagatttccttaccacgatccctccccctccagaaatgctagccgaactgaggcaaggaaacaatcagagcagatcccgagagggtctcgggagaaacagggtacggcactgtttctgctgctcccaacatgtcccccagccaaggagcttttacagcctcctggggtgtgacatgatttaagaaggcctcaaggttccagtctgggatacaaaaagctgtaaatgaacttctctaggtttacagaagagcagcatggagctgagaacagaagacaaacatctggccggggaagccatcccctccgcctcaccctctaaccagggtccctgggttgagactgcctatctccctctggccaaagacatgaattctaagaagagctattcctttcttaaaagccgggaagcccttggctgggggggcagggcagaggggtggatgtgtcttcacaatctcctaggacgctttctgcagtgtccagagtcacatgaagcaaacaatgcctgcagggtgacccagcatctcctaaaggttttcctaaggagggaatggttcaagtatatattctatcaggatgcttgtcacagcactacttataataataataaaaaaaatagtaaatgacctaataggggttcgttaaataaattacggcactttgactcaatggaaccttacgcaacacttacaaataaagaatgtagctttggccgggtctggtggctcatgcctgtaatcccagcactttgggaggccgaggtgggcggatcacaaggtcaagagatcgagaccagcctggccaacacggtgaaacaccgtctctactaaaaacacaaaaattagctgggcgtggtggtgggtgcctgcagtcccagctactcgggaggctgaggcaggagaactgcttgaacccaggaggcagaggttgcagtgggccaagatggcaccactgcactccagcctgggcaacagactccgtctcaaaaaaaaaaaaaaaaatgtagctttatatcgcttgacatgaaaaagcaatcataatataataaatgcaaggcaagttacaaaaccgtgtgcattcactacccacttaatttatctatctatggatgtatggttatataaacacaaacgcacagaaaaaaatctgaaaaggacatatgccaaaatattaataaaaggataatgggtgatttaaataagtcttctttagactatcttgtgtataatcaaaacacaacagaactgtgtatgtttctgtcttgctgaatctgtcctttgaggctctgtgaaatctctgtgaatctgactaatgatcactcggcctctgtggctgaatcttccttactaaggaagcgcccagcaggcaggctgctttaccacctgttttacttttttatttttggtcaaatctaagtccacggactgcatacgtttccacttcacacacaagcttcccctttgggataatattttaacagctgtgaagctaaccatcatttcgttttgccagagttgcccacacacctggctcccccatcctgggacaaggcggccagcacctcttgggcctgcacccctcacctgtagcgattccatcaaagagagacagcacccggatgggcttcctcttctcagctgggacaggtgggtaaacctttggagggtcctaagcagtgagcacaacaggtcagatgcaggcccagcggtgtcccaagctcccacccagcgctggccctccagccaggctcctagacccacacaccctgcgcacagctcaggccccacaaccaaggctcagccaagggagctcgagaccgcgccccaggcccagcactcacaaattcctggtcgtggttattagcgaagaacatctggagccgggagggccagtcctctcgccgccgcagcagcccgtaggtacccttgtgcccgcacatgtagcagttccaggggtcttccttaatggctgcctgggcagcccccggccccaccaagaggtccacacactccacgcaaaagcacctggaaggagacccagtgagcagaggagactctcagccctggtccggggaggccaaggtgtgctacctggaatggaaagaccgggtctggagcatggctagggggtggagggtctgtggggaagggagaggaggggaggcggtgggcggcgggagcctggggcccagctaaggagaccactggaggccacaacagcctcacctgcagcagttgttgtttccgcacatgagcacctcacggcccccacagcagatggtgcagtaggactggtagccgtcgtcgtcgtactggtacgcacactccagaaagcagttctagacagcagcgggaagggtcagaaaccaccaggacgggtcccaggacggccaggacgaagggaggctccacacctggcctcacagagcctaagccctgaagacatgaccccgccaccaccttagccagggtcaggccccagctgcagatctgggaaggggaaacctcatctgcctgtgcaccgccatggacagaaccaaagagcagcctgagaacaaggccagggagggggctgcaccaccaccttgggccttcctgcagccctgggtttttctcctgggctccccagggcacggcaaccctgctacactctgcctgagcttgtccccgctgctctgctcccatccccacatctggggactaaaatggggcttgagagaggtaaagaatctttcagaggagaaaaatgagagcaagtcaaaagcttgaaacccaagggcccgtgtcatcaggactctgcttccagaggaagctctgaagtctacatcacacgcacaccgggtgtcaccctgtacatgcccagaagcggtggacacagtcagccagaaggccgaagggccggcctcaacggcacctctcctgggtgggtgtgctcctaccttgcagttttggcacattcctccaacgaagagggggtgttccagggtaacattgaggctcccacaggagatgcagatgtctggaaagcagagggaggggatggggtgagtaccaccgaagggcctctccctccccgggccggagcccagcaccagaccagccacaaaaaaggggtgtgccagagcggcagccagaaaagagtccagggtgccccacggaaaagggaggcactgtgaccccagtctcgaacgccatcatctcagagcaccaatgccaccatccacaaacagggatggagtgacagcaggacagaaacctgctcatgagaagcagccctggttccaggttactcaggagggattcccggggtaatcctcaagtcctgacccctgccccaatcctcccaggccgagggtcctgagccagatccaccagcaccaggctgagggcgacagccccaggatgagagaggtgagcaaaggtgaaaggctgaaaggggacctgtaggtgagttcagtcacacccaagaggggctgcccttctgtggccactggggagtcccacaccctgaagaccagcccacgccattgacaggagagcagaatcatggcaccagaaagacagacagtgcacgaagcacggtgaaggtggtgtgacacgcaggacgtggcccctggtcccatgtcattcaaaccttcctaagtgcctctgctactctgccccatgccacactaggagtgccagagttcccaggcaacaaacttaccctcaatgttccggcacttctgccgcacctcgtacaccagccgctctgcaaggggaggagagctggcgtcagaggaggccgcgcctgctcctcggatgcaggcctcctggtgccaccctctccagaagcaggccaactacctcttgtgcgctcatcaataatctccttgaccttgggcttctccgctgtgctcttccggggctttttggctggtggaggtggtgcgtaggcagctgcctcaggttccacccacatgtccgtgtacacttctttgtagggattcttctcttctggaggaggaaagcaggtgccaaggtcagttacaggctgacaggaaactccagccccttcccccaccctccttacagtggggtgcggcctggtctccaacttgttcccacctcccaactctacggttctagccaaccaacagagagcaggtcattcaagtcctgaccccagggcaagagagaccccggctgttcccactgggcccctctgtggaggccttggcagccctccctaagcatggctttcccagccctggtgtggatctgcctggcgggcaggggtcccagaaagctgggtgccctcatttaccttctggtggctccaggcccttagggccagaaggctggaagccccccagggcccattcaatcatgggcttgttctgcacctccacggccttggcagtgtcactctcatcgctgtcgtggcacaccgggaacagcttccccgcgcggctgctggccacctggagggtgacacgccagggttggggttgtcaggacaggctggaaggcagatgggtcaggctcaaggccagactctgagtagtgagggtggcacaggcaagatggggaggaaccgctgaggaggagcgggatgtgcatacgggcgagcgaggtggagagaaaggagtcgctgcctcctgggcctccgttctgctcaagcccgacctgcactccaacttccaggcctcctagtgctctaggctcctcctccgagctcccagcagggacactcacctgcaggacctcgtagatggctttgcggtacatgggctgcttgttgtacgtggcctggtggaacgcactgcaaaacgagctcagcggcatcagcttctcaacacacacctggggggacaagccaggccttgtttgccgaggcttacacttgcaagcacccaccccatgccttgcaactggcaggggctgggagcctcgagagtcagtctcagccctggaggggaccagatacagtgataaataattacccgatgcaaagaggagtccagaccaagagtagggaagtacctgagtgcaggtggaaaggaattctagtgaataggttcctggaaggctaaaactgggccagcatcctagctctctgagccacaggtgcaacctaattatccctacagcttcttccacccaccacaggcagagtaggggtgagcagaacccacttccatcaccccaattccagactgcccccagccaaaaccacaggccctgggatcaagaaccttcccccaccccaggctactgccaaaccccacaacttaccactgagaatttgccgtctccgaaccacatgacccagcgggtgccttcagctgctcggctccggcccgtcatccaccaagacacaatgcggcctggccaccaggagaagccccgcagtttcccccacaccagctccccaatgccaaagccccggccgtcctggagccccaaggagcagaaatcattacacagtggtcacgaggccctgccaccctgatccccccatggcaaccccagccctgggcatctggggggcaggacagccaggagggagctccatctgaatgaggcaagacagagcaaaatcggggagacgaagaggcccggggtcaggtggagagagcgagcggcccgtgggagatggagagaggagagcaggacgggaggagctggcagtggaaggcccccggaaagagctggccacggctggtgaagaagccgctcacctcgtactctggctcgtcatcgcctgctttggtggcattcttgtccccagcatcggaccccacgggctcaggcgtggtagccacagtgggggatgcggggtcagtgggctgctgcacagcaggagggctggcctcctccaccttctgagactccccgggcccctggttttcttccacagcattcattcctgcaatgaccttggctttcttctcagcctggggaaacaaaaaacaaaaagtcaccttgacctctccaggaattagcaaggccacctgacactcaaggggaccatgtttgtcaaaacccggaacagtgacagaaggtcaagggctggagagagccaaccagctgccttgccgtgaaaaatggaaagacttgaagtagagaggtgaactcaagtcacacaattccagccttcttttctgccttttaggaaaccttcctcccagatctaatcttcctcaatctcatcagcatatcggttgcctaccctatgatacggaaatgttatttatttatttttttttttggagacagagtcactctttcacccaggctggagtgcagtggcgcaatctcggctcactgcaacctccacctcccaggttcaagcgattcgcctgtctcagcctcccgagtagctgggattacaggcatgtaccaccacacctggctaatttttgtatttttagtagagatggggtttcgccatattgaccaggctggtctctaactcctgacctcaggtgatttgcccgcctcagcctcccaaagtgctgggattacaggcatgagccactgtgtctagcctacgttaatgttttttttttaattttattattattatactttaagttttagggtacatgtgcacaacgtgcaggtttgttacatatgtattcatgtgccatgttggtgtgctgcacccattaacttgtcatttagcattataccgtatatctcctaatgctatccctccccctacctatggagatgttaattctatccaaatattaatcaggcactattgtttagacacagatattggttccaccctctcctatcttcttaatcaagactaggatcttcagccaggcatgtgcctgtaatcccagttactgagcagggaggatcacttgagcccaggagttcaagaccagcctgggcaacatagcaagaccctgtcaccaaaaatttaaaaagcaagggggaccctctcttcttctccacaattcccctgggcaatcaatccttcctattcctggtttccaggccacaattctagttttgtgatgtctgctgacgaagaaatcactgctctgggtttaaagagcccatctccccccagcacatgctcaaacaccataggaagctccccaagagcctgtctgttcccatgctcagacgccatgctggagttcttatggatcacacccagtgtgtattgttaccagattcgaccccttctatgtgcacccttcagatccataaatacatgtattcattcagttatttactgagcaggcactatagaccaggcgtgctctctgccatcccaccaacaaattaataagccaaaccccagttattctcccattgcacagcctccatcctttcaccgtatcacactcgtctttcaggctacgatccacgcgcccattccttctcacaacccgctccaggatccctacaaaggagaatgaaatccttgatacttagctctgagaaccattagccttttactgaatctaggaaacacggccctctgacttcaaggctttgcacccatttccaccataccagatttagaggggagaaaaccccattttctacatgcctttcaaaagagctcccccatgggcctagagctgcgaatgcaaacccatcctcaagggtaaagaggatgagcaagcaacctggagtatgaagaagagctctaatctgaagttgcagcctctacattcctgtcggagcctcacaaccagcagctgactttggagcagtcctttctaggagttgctccaacataaaaaggcacctgaacggaaggatttctggaaagcttttctgacctgtttaaaaatctggtgtatatatggaccaatgattcccaggactctcccaaagcctgtcaatggaccccccagatccaagggtcccaggttaagaacctttgtttgaagctcagtggtccaatgtattgtcttacagattcatttaatttcactgagtcttcaagtctttgcctccaagccacagaccaatctgtttcttatggcgattccgaaaaacactgaagatgttaagtcctagttcttcctctgactcaacaaattctaaaacaggataatgcatcctttgcccccaacccccaaacagctgggaaaatgagctcatggatggcggaatgagctcacggatcggactgcgggggtggaagaatgtggagtaattgctcatcgctccctagccccactctcacctggccagaactctgccctccccttcctactatcaattagccatcgcctcctcccctacgagaaggtgcactgaagtgtggaccccgctatgggggagggtgcctcccttgctgggatcctcagctgcgtcagctaccctcgcagaggagcccacaccacgccgctgctcctcgcccaccacgccttctcaagcttcaggcatgggtggctgacctagggtgatgcctcggatgatccaaagaccccgtttccaggcgtggcgaggcccctgagccagtacgaggtgtgcaggtagcagtgggcgggaaggggaaaggacccgctatcagttcctggcagcggcagcagcaggtgggctgggctcctcctctggctccccaggtctaggagtcgtgcctgacaccaccctcagcactcccccacggcccctttgtctctcagccccttcacagcgagttcctgaacattcttcttcccccacaacttcccccagcttgtcagatgccgcgctgcgagctgttcagcatccccagcccacttggtgcagaacacgcacccggcccggtaagggctggcggaggaggaaggggcctccatcaggactggggcagtggggtgggggaaggaagaagcgggggggggggtgggtgagcagcagggggcctgacgaaaggggaaggggcagccggagctgggtgggggaggggcctcactagactaggcctgtctggggcgtagggaaagcacccctttccctctgcactcctgccttcctccccaggcaaacaataagagaaacaggggtgaactcgaggctctcgcatttgggctgcgggctgctcacccccaggggggcggagaaaccaggcggcattcaagagacaccacactattccccactccctgctggctcacggaagcccctgggcctggagtccgtccagactgggaaagccaccgggaactccggtgactactgcctccggtccagtcccatctcctcaggcagttgtcccgcctccacctccccctgcgactgcagcgcttcccattccaaaggtcagaggtctgagcgccaccgcccccaagcccatgcggccttgggctaccctggtgtcacaggccggccccctgtcagggtcgcaccgtgctctcccgccccccaccacttctttctggcggcctgcctggaggcttccaggaactcgcaggagaggaagctgtccctcttaagaggccgcaagctggcagggccctgaggaccgcgtggtcccccagccagaaacgcaggtcaccagggaagtgccaggcacccatctgccagctcagctgaagctgcctccaacccaactcctgggccaccagctccgcgtgccccagcctgcagttaccactgcccgggctcccggccggctgctcttcctgtcccccgagggcgccaggtgccactggagccctcgaggagtggggccttggggctcgtgggcaggaaggcggcgggccagcactaagtcagcatctccagaactcgggccaggccgggacgccgcggctgctgcgggccggggaggcatacttcactcttttcaaacccggagggctgcggagatcctcccaccggccctgccgcctccccgcccccggtctccccggggctccgtccaggaacctacccataaggccaggtgcagcccctctgcagtcgcgctcaggtgtgagccgcggccctgaagctctggaagtagctgcccgtcttgggggaggggaagggggcgatggggctgggggcggagggggccactgggaggggaggggggcggcgggggggagggagggaacattttctttgtctaggactccaggtcacgtgggccccgctggagggcctggttggctgcgagcggcccggggagggggccggcgctccgacgctggcgctgggccagcccctcttctccggtccgaggggcgcggggccggggggcgaggccgttccccgcccgttcccagggcccgcccaggccgggctgcagggagcgccccgccttcgggaagaccgcctggcccctcccccagctctggaagagattagcgcggggccggggggccgggaggggagggaaggggctgctcccgagccgcctgcccggagggagccgggggtccgggcgaaagcaagccggagctttcggacggcctgggagagccgggagaaagttgtgaaaagtgagtttctctgaagcacaaccaaaaaaaaaaaaagaaaaagcttacagataggaggcccaggaagctgtaggaaaactcagcacacagacggagagtgacagcaggcgcgcgcaggcattgggagcgctccagatcggggattgtttggggggtctcccgcctccacactacaggtgaatagagaagcgggggggcctcaaaaagcgcggcgtgaggaggtcaggcttcgagtcccagggcccctgcgtcactctgggccttccctggatttctcattttcctgtttgcaaggttggtcgcggcgagggcgctccttcagaaagttcagcaattccttcattcccaggctcaaacatctgcagatcgagaagacctgactcctctcctggggcctccaggtgcggcctccaggtgcagcctccgccatttcaagcttcctcctcctgaacaaaggcacctacccccaaggcagacgcagtccccacccacagccctccattacgttggctgtaggatcagataaagaaatagaccctgttggctctgccctcgaggggttgaagattccactagacttggagaaatatgaaaggatcactgtaaaacaaacatatgtaaaggtaactatgccacaaataccaagtagaaaaaaatgggcggcatggatgacaaaagaggtcagaggtcagttccaggtgagccgactgggcctggaggctggatcggacttggaatgaggtgagatgggtaggatgagcaagagctgccgggctggggagggaggagaccctcgcccacctccaccctcccagtacacgacagggcaaggtaatggcaagccttcaggtgcgtccttgggtatattctgtagcagggaagaataaccgcaggttttctgacaagatgaatgagtattttggaaaaatcagcctagttgccgttggcaagatgaattagaaggaagaactgaggaaatggaggaaaatgcaccccacagcagagggctatttgggcagcggcacttgttagaagatctggacttggccgagcgcggtggctcacgcctataatcccagcactttggaaggctgaggcaggcggatcatgaggtcaggagtttgagaccggcctgactaacatggtgaaaccttgtctctactaaaaatacaaaaattagccaggcgtggtggcgtgcgccagtaatcccagctacttgggaggctgaggcaagagaatcgcttcaacttaggaggcggatgttgcagtgagccgagatcatgccactgcactccagcctgggcaacagagcgagactccgtctcaaaaaaaaaaaaaaaaaagatctggacttcagttctgtttccaccaccatgaccttaaacaagtcacttaacccccaagaaatctgttgtctcatctgcaaaacgagtgatgacatcagccctctttggccatggaacgccaccatctcctaatgacaatgagacaattctctaggtgcctggctcccagccacagtcacctgggacatacaggtgctggtataatgaagtcacgagatgtgcagtgagggagccccccctccccctgagggccatcagagcaagcaaaccctgaagagcaaggaccccaaaccagagagccttctacctagaagacttgggtacagactcccccccaaccctgagacccagaatccatacagctaggaaaagaagctattcgaaaaacaagcaaacaaacaaaaacacaggccctcttctgttccaacccatctttcaacccaactaaggtatttgcctggtacacatttccaggggctccccaagcagaagtgagaagcccagaatttgtccctcttgcctgctcccaacctttagggaatgcagcatgacttgcttcgctgcttctctcactgatacctcttctgcatccatgccggtcaacgggcctgagaacttacttcaggcctcctctcaaaagaagtttctggttctggcttggtggccttttgcagacactgtctcatgtacgatacccgctcttccattataatgcggctaaacaccttagactccacattctgtggtcttgggacataagactgcaatgatgccgtgcgtgcagcaaggactcaaggtgtcagaactggccagaactgttcactttctcttggccacatattaggtagctgttccctccggccgtcaaacttccttattctcatcctttaacattaaagtcaaatcctacctcttccacacaacttcccaacaagcaaaaggaagcctaggctcaaaggtgtccccttaacaacccagagcatctttcttccctctcctgtaactatgcagacaggaaacactgccttttctagactgagtcgcttaaacagagatgtgtcttctttgtggtcaatgcacagtcagaccccaaagcagaagagaccccaagatctagagcaggggtgattttagtaaaaggaaaaatccccttactaaaatggggcaatcttcaaggatcctcaggtcacacatgctcttgagcttccaaagtaaacctccctggtagtttaccagataggtcttttgtttgagttaaagatagccaaactcaaatagcagcaccatgtaaaataagccatgttcttggatttgttataaaagtatgttgaaaggaggaactcctggatgagaagaaaatatgctggatgtcaagagcctaaaagaggtgctggaaaggaagtatccagtgtggtccaatggagagagtgacctgagaatgagagcacagttcctgtttggtgggcagacaacagtgatcccataggcctcctaagcccgacaaaaatacctctgaaggacacctctctgccctgatcctgtattcatcaagcaaacttccaattttaattacattttccaatgactctgataccagtaagttgccagaaaacagcaggacaagcattatgatttgtgtggcaaggacatgtcctgttatcaattggtaaatctaacattctggggtgcatcattctcctgggtcattgaagagtcatgatcataagtatgttaatgtgactttccagcctcaaagaattgagacgagacactagcccatcatgatacctctccaaagagcagcaacgcccggagctcatgcctgacgttttactcaaagttcagtgctctgtggcatgctctgtcataaaatccagttccggcaggatgagggtagatgatgttgctgtcatcccaccaggacatttaccatgcgagtctctctactctgaatcagagaagccatggtccctataaagccatctgcaaagcaacacatatgaagtcactgcacacgtatttccaccccacacgtattcccaccaaccccaagaccagggagacctgatccagacaaaaagagaggtcaggatggatgtctgttctgaacccgtcctcctcccacctacagctcaaaagcctcaatgccaatcagtcaacactctgcgtgacattctaggcccccacgaatctggaggcctccgtgtgatatcatgaagcccacgctttgcccgcccacttgctattcctcatgctgttccttcttcctggaaggttcctccccttcaactttcaccacctaaaccctgcatatccttctacaccagtccgccagtgacctccaccatgaaagttcctctagccttgcactgtccaggatggcagttactggctgcatgtgtctatttgaattaaatacaaattaaaatttagttcctcagtcacactggctacattccaagtgtccaagagccacatgtggctgggggctactgaattcgatggcactgattttaaaacattgccatcatcccagaaagttcttttgacagtgctgccctggcccctcacccttatcctccccttctgtcccttatctttcccttctgtcccttatctttcccttctgtcccttatcttctaccccatccctgccacactccccttgtactttgtaagcctctgttaggacctgccagtctttgccttgtgcgaaggtgattgtgtactcatctttctcctttacaagattaaatattcctagagggcagggactggacctcattcaccttcgtatggaagcagtgtgggctagagcatcttgcccatagtagaggattaaaaatgaactgaatgcagtgttgtctcaggaaccttatcccaaatccactgcccaagttccaagttggggaatggatccatttcatagcaggaattctaatcgttgctacgaggtcccagtctaccaaaagaggctgggaatctttgttttcctattcccttgcaatccatatggaggttgcaagcaaatgaccaggactgggctgctggcagtgaagctaaaaatagccatgaagccaacagcgtggagttagcaggacttgttgctaaggagaccagtcgcagagagagcaactaagcagggggaaggtgtcagatgtgcacccggagagcagaggggtccaaaggctcgcacctagcggtgttctgccttctggcagctcctggctgatgctctaagtggggcagacattccccctgtccctcagtaacccatctccatggaaaccaccaggactggggtgaagtaccagcccctggaagggaggcctctgcttggagcttgttgttatggcaacatccccccttcctgtcattctctctctcctggcttctctggagggagagaagtgggggtctggtcttggcttagccggcatgaccaggaaacacccgcttcctgacaagactaggctgtaaggggctctccagaagctcctggaagcccggagaggccagtcaatccttagcacaggcagaacttcctttcttttcacgagggccttgctaatcacctcgccaggagaaccccagattcactttggtttaattgcatctggatcacccaaggagggctttaaaaatacagattcttggggtctacctacgtagatcagcgggcttaaggtggggcccaggaatctattaaaacctccctgggtaattctaatactagccaggtgtggaaacacggagaccctggctgtgtctgttacaaatgagaacactgaggcctagagaggcccgagcccacctgaaaggtcagagcaattcactggagagaagtggtctggagagaggaggggaagcagaaggagatggaggtcagctccctcggggcatgcgtcccaggtgagccctcctctgggcctttcccacctgctccctgatcaagcacaacctgttgctgtctgatgctggactgtgatttcaaaccaaagcctctgacaagctgccccctgtggtagaatgtggaaggtagggggctaggaatctggttctcagagtagcccaggcagatgatttgggctaaaagagaaatccatcctcctgaagaaaagcaaaagggtcaccatggcaactgcagtgtgctgcctggttgggctctatgccatcaccccaaacctcggccctgccccagaacctcctccctgagtctggggagaggagcggcatttgggcaaatgctgtcgggcaggggcacccccctaacccctgcactgagcagtctggttttagaacctgtaagcgaattgtgctttatcctgggagcctgcctgaagctcacctaaacaccggatcaggtcagtcagtccttagcacctgcagtaggtaggctggggggaagggaagcaaagaggtgcaagagctagtagacatgatggggctctaggcctctgttactcacagcctaattgtgtacccaagacccaccacacatgaaaccacagccctcattcaagacagcatgcaattagatggtaaattatgtggtagggatgctttctacatgtgccgaaggaactcagaggcagctgggatcagtcaaggcaggaaggctcaagggaagatgaaagagcggaaactaggaatgggcacaacctcccaggtttttcagacaggaatggccagatctagggggcatctgtaactgcatgagcttcctggcagatgaatggcaggaatgaaaagcacaagcacagccttagggtatctgttagggagggggagtggtaaggggctttttgcactgacactctagatgaattcttctaaatcaaggaggaagatgcaggatgggggagcccaactgctggaaaggaaagcccaacttccctcttgctgataccctcacctccccttctctccccacctctatcccagagcccctggctccctcgttctctcccagccaaccctacacttccctaatggtgtatgctgggaagtcccagcccaatagatgcgccatcaggctctggagctttggtggctgccttccctttccctatagcctgccccataaggggaaggcttctccacaaacccagctcttccttcctgctcacttccacccgctatcctggaactgctgggtctgcccagctctaccagtgacggagtctggggccagggagcagagatgccagggcaggggtgggagagtagcagtaccccactgataccggatctcaggtgccccttaccaggaaattcaactgggaggggatgccaggtctttcactgagcagggcgctgagcagggtgttttacagctgatgacaagaccttaaataacccctagcttctttgggccttggtttcctaactagcctaatagaatcacacgtatctgctaaatattacagataaaatcaaaggaagccaggagggactcacatttgagaggtgagggacttcatgacaagtttgctttagggacgtgtcgatgctgtcactttgctttagaaactggaccctggagagaagtgttaagtttatactaaggggggtgtggccaaaaggaacctggtaaaccttaacagccaggcctgttttccccacccttcccccaccccttctccaggctccaggggtcaaagggaggggcctaaaggagccgcattcagattcaggcatgcagaccctctcaagtttcagggtccaaagagaagactccagaggagcccagcagacaggcactgcggtaactattgctgaaaacagcaggacccctgccatctccatccgaaaggaaacatttaaattcctgtaccaagtcctttccggtctttcccccccaaccctgtttggaaactgttccctaggtctgcccgccttacagtccctacttcttcctttgcttgttaccacaatcagactggcaacccaagccctatcaattacccggagagcttgggaaaccacccttgctgggtacatcactaaattcccaacgtgattaacctggcccaggtttaaacaaaatgtgtagagagacccccgccgccaatgcaggcgatacaataaatgcatctaccaatacatctgtgtgggaatctcatctgtgccagatttggtttacctctaatcatctgaggcttggtggttttcaagctgtagtaagccccagaatcatctgggggctggctagaaaatcaaacctacaagtactgtcccagagcttctgctccaggagtgtgcctttttaatgcactgcccaggtggttctggtgaggtaacacacaatctcaccctttgagaaacattgaagtctaagagcatctttggtatatataagcaagctcactcaatttttgtttttttttgccccacaaagctgcctttccaacagcatctagcgtcaaatatacaggaggctgagctgttattcctgtttttgttcaatccatctgagttgcaagtgaaaataatatttatactgcccaccattcatggactaaagaggaacggggaagagctgtcgcatctgtagagttgctactgaagaatggcaagtcagaaaaatggtaacattcacacgcacacttgcacacacacacactcaccatgcagttggcctgggagcacacacacacactcaccatgcagttggcctgggagggagtgcggactgagaggtgaaggatgcggggtggtcgcagggagttgatggaagtcagaaagggctccacagagggcatggtggcacgtgcctgtaattccagctacttgggaagctgaggtgggaggatcacttgagcccaagagtccaaggctgcagtgagctacgatcagagcatgccactgcactccagcctgggcgacagagcaagactctgtctcaaaaattaacgtaggcccggcatgatggctcacgcctgtaattccagcactttgggaggccgaggtgggcagatcacttgaggtcaggagttcgagaccagcctggccaacatggtgaaaacccatctctactaaaaatacaaaaattagccagaggtggccaagtgtggtggctcatgcctgtaatcccagcactttgggaggctgaggtgggtggatcatctgagctcaggagtttgagactagcctggccaacatggtgaaaccccgtctccactaaaattacaaaaattagccaggcatggtggcgtgtgcctatagtcccagctactcaggaggctgaggcaggagaatcacttgaacccgggaggcagaggttgcagtgagccaagaccatgccactgcactccagcctgggtgacagagtgagactctgtctcaaaaaaaaaaaaaaaaaaaaaagccagaggtgggggcggacacctataatcccagctacttgggaggctgaggtgggaggattgcttgaacccaggaggcggaggttgaagtgagccgagatcacacctctgcactccagcctgggtgacagagtgagactccgtctcaaaaaaaaaaaaaaaccataaataaataaaataaatagaaatgtatatattgtaaaagtaaagggctgcatagataggtgaaaggggggttcagtagtcctctaactggttcaggaaatcctcctggacgttgacccccggccacctgctcccagaagtcccatgtccttgtccctgcccctccctatcctggtcctctcctagcaggtctgctttctgtgctttctctccctgccctcctgcctgtgcgtcccctccatgaggaccaccctggaatctgactaaacctgtcccctggggtcgggcgcagtggctcacacctgtaatcccagcactttgggaggccaaggtgggcagatcatgagatcaggagatcaagaccatcctggccaacatggtgaaaccccaccccgtctctactaaaaatacaaaaattagctgggcatggcagcacatgcctgtaaccccacctactcgggaggctgaggcaggagaatcacttgaaccagggagtcaagggttgcagtgagctgagattgtgccactgcactccagcctggcgagagagcaagactccgtctcaaaaaaaaaaaaaaaaaaaacctgtccccattgacaccaatctgctggcttctcaaaagcagcttatccaaaccctagctcaaaaatccaccccctcctaagagaaaatatcttaaagaccttgcggtagacagagaattcttagagataacacacacaaacactaaccaataaaggaaaaaaatgggtaagttggactttattaaaaacttctgctcatcagaatacataagaaaatgaaaagttcactgtatcatcctgcctcaaacctgctcttcctccaagattctctacctcagataatgaaccctatccccagcccagctcccaataccagacaaatttttccctcccctccaaccaggaccagttctagcaattccttcaagtttgcctctcattacctcaaccctcagtcaaggccaaatgtaatgttctcctacctggtcctgcttctaaacttcctctctctggggaatacttattgtcctgccaggttatcttcctaaactatgtgtccaattctcttccacccctgctctccactggacaacgaagcctaaatttctcactatggcaggaagaccactgaggatgtgaccatcttgctttctagttctgtctcttcttgcccatcctccctaacccctgcaccctagttaccagatctcttactactccctaaacaacccagaagtcatgcctccttctctttgccctcagtagttccttttcctgaaatgccttcctcctctttaacacttttttatttgtttgtttataatttattgagatagtatctcactctgtcacccaggctggagtccagtggcatgatcatggctcactgcagcctcgacctcagcctcctgagtagctgggaccattggtgcacaacaccatgcccagctaattaaatattttttttgtagagagtgggtctggccatgttgcccaggctgctcttgaactcctgggctcaagcaatcctcccactttggtctcccaaagtgctgggattacactgcacccagcctcttttgcacttactgaaattctcaaaggatgcctgcctcctccaggaagctttcctggagtcctccagaagctgctctcatgctcctttatgcttcatgttgggctctttacacaggagcacagagcaagccccacgctctgactgccactgaggcttgttggaaacattcctgcctcctccacttgacaatgtgtgcctctgggacagggactatatccaattggtctccccctaccccgccactagcatagtatcatgtttatttaccaagtactgaattactaagcaatcagtagtaagtactgaggtccattaactcctttaacgagtgtactggcctcttaataaagcggcagagggctctggcagaccaccccatatgtgaacatcccacggcctccctgacaagcagtctggtttttaaagcagagagaacattggctattatattttctgctttgtcagccccatagacagtgctatgggaaaaactttgaggcactctagactccaaactcctagaggatttctttgaccacctcccttaggaccccactccatgcccttcccccactgtccctgccaagcagtcctgttcaggtcaatggcggtacactgcctctccctaggcaccgccttccctgaggcccttaggcagggctagggagttgcttgcacagtccttcccttagtatttctaaaacaaccctgccctggctacagcacaattcattcatttacctaccaacctctcacaggggagggtagaattctgacttgcctttaaatttgcttccttagtgtctagaaaatgttggaacatagtagacacccagacacacaaggtggtatcttaaagactgagcacacagtatctgctcagtaaaggctggacaaccctttggtttttttttttttttttttttttttgagacaaggtctcgctctgtcgcccaggctggagtgcagtggcgcaatcttgactcactgcaacctccaccaccctggctcaaacgattcttgtgcctcagccttccaagtagctgggattacaggcatgtgccaccacgcccagctaatttttgtattttcagtagagacggcgtttcaccatgttagccagactggtctcgaattcctggcctcaagagatccacccgccttggcctcccacagtgttgggattacaggcgtgagccactgtgctgggccaaaggttttttttttaaaaagagttttttgttttgtttttttttgtgagacagagtctggctctgtcgcccaggctggagtgcagtggtgcgatctcggctcactgcaagctccgcctcccgggttcacgccattctcctgcctcagcctcccgagtagctgggaggtgcctgccaccacgcccggctaattttttgtatttttagtagagagggggtttcaccatgttagccaggatggtctcgatctgctgacctcatgatacgcctgccttcgcctcccaaagtgctgggattacaggcgtgagccaccacccccggccaaaaagagtttttataaggatgcttcacgtatgtgcctttagaagagacgtatatgcgaggtctgagaattcactcaaatatttaatttagaatttatgtacaaggtaatctaggtaataaagagagtgcagatcatgattccagtctcaccccccaacctgccgtgatggaattttagaatctctggggtcatctcatctatttctgtcgcattataaaccaggaaactaaaatgccgaaagcagaaagacctcctcacatccatagctaaggaggggcagaagctgagacgagaaaccaggcctcccaaatctcattccaacattttcttaatccagtttcacaacatcatccacatggtcatgaaaaaacagcaattcaagggcaagggttcaggaccacatgagtagagcagggaggggtggtcggggaggctgaaagggacctgagcctcctggcaaagaggcatggggagcagccccaacaactgcaggccgggggcgggaagagcatgcggcaggctggaaagccgggccagctctctccctctcttctaaatgcattcttcaatttcatgacaatttccaagccaggaaaccaggaaaactgggagtgtaggttagtcatttgggtacacaacagaagcaacacgagatttggagtctagttttgcccattgggccactccatcaggatacccatgtggccgcaacctacttacctagataaatcttaattttctaatagcaaaatacaggttaaaaaaatacttctggccgggcgcggtggctcatgcctgtaatcccagcactttggaggctgaggcaggtggatcacctgaggtcaggagttcaagaccagcctggccaacatggtgaaaccccatctctcctaaaaatacaaaaaattagccgggtgtggtggcaggtgcctgtaatcctagctacttgggaggctggggcaggagaatcgcttgaacccaagaggcagaggttgcagtgagctgagatcatgccactgcacttcagactgggtgacagagtaagactccatctcaaaaaaaaaaaaaagacattaaatgcagataatatgttttaggattgtggtgaaagctaatgctcctggcatagtgcctgatgtaaagtaggtgctcagtgaagttcaacaccctttccctggttcaggctttgctgtggccaggagttggccctgggccagcaactagtcacctaccccaccctgcctctttttttctcaccactaaaaagtaggggttgttctaagagctgttctctctgtgccccagaagtgaagactctggtgcgcaaccaacccatctacttaaaggacaatggggagtccctctgtggcaactttagtagcctatggtaaaggccagccctcgaagtcactactgcttacaggctgtcatgggagcctctagaacttgttcagccttgggtaaagtatacttgctgtgcctactccaaacatcatcatctccttcaagggtgatgttatttttgaggccacgctgcaaaaggtcaggtagggcaaataagtgaggaatgtcttccagtccaaatgctctaaaactgcttcccatacagttggctaataatttgttttgagcctttactggtctactttgcacttccatttctcctgaactagactaaagcccaggagatcacaccttattatctcctccttcccatagcccctagcacaaggcccctttacttagtaggtgctgagtgactgcttattaaatggaatatgacacagcatgggggaccttctggacattcatggcctgctctcctcagggcagacaggaagcacagtctgttgagactgcagggttgtaaagtcagaggaggcaacatttgctaagctcatagaagcagcagcacaaatggccaataaacataggaaaagatgttcaaccttattatctgggaaatgccaattaaaagcataacaagatactattttcccacccatttgactagcaaaatattgatgttggcaaaggtcttctcataccctgttcacagaagcataaattggagtgccctttttagagggcagtttggcagatgtcataaaatgtaaaatgcacattcccttcagctaggcctttttctttctaggtatctgtcttagagaaacagatgcacaaagaggtatgactaaggatgttcaccgctgcaatgctaaacagtaaaatatcataaacaacataaatggccaccaataacagaatggctaaataaaaccatgggaatccacatggtggaatataatagtaattacgtggctagattgcacagacttattggaagtcaaaaaccaagctgtaaaatgaaactacagtgtggttccatttgtgtaaaaagaacaggaaaaaaagaacccctgaagcaaaattatatatttacacgcatacacacggataggaaaaaatcatgacgttacaccaaactgatagcatcaagtatttctggtgaaggaattaaattttcaggccaggtgtggtggctcatgcctgtaatcccagtactttgggaggtggaggcaaaaggactgcttgagcccaggagttcaaagccagcctggtcaacataaggagacccccatctctacaaaaaatttaaaaattagccaagtgtggtggcacatgcctgtggtcccagctactcaggaggcttaggtgggaggatcacctgagccaagaagttgaggctgcagtgagccatgatcatgccattgtactccagcctggccaatggagcaggaccctgtctcaaaataaaattttggggtggcaagtttgggcggactttttcacaagaatgtatttgtgtaatacttatgtaatttaaaatactttctaaaaaattataaagttcctattatatgctagctctgtgctaggagctttaaatgttgtgtgttgtccacacaactctgagataagaattgttcattcattcagcacactttcaccctgcacctcccacatgccagccctgggggcagggggtgcccagaatgcctgtattgaacgagcttaaatgcagaaatgggtagaggcagaaaacaagctggcgagtgctgctgtcatggagatgcagagtacagccaagtccatccacagaggaggaacctcagctggggtacagggtaagtgatgcctaaggtcccacacccagtaagtgggacctttcttaaggcagtatttgaacttgcctccaaaggtcgcagtaaacagcagccaacccttaaggtccatgaaggctctgctatctgctgggcagccctgggcggagggagtgggttgtatctcagtgtggcgagggaagggaggagagactatgatgttccagtcacagatgtttcattatcactattcaatattattaagcatctaataagtataaggatgcatgagtcaagggtccctaccttcaggtcggaagcaggaaagagaccagatcctagaacaataggacatggtacccgctgcctagacggaatttagaatccggctggggtgaagagattaatgagcgagtcatgccatcaatgtgctgtaactgagtcctaaaaccaccagccgcgacacaaactggagtgagtggcttcccaggcgagatgaccgcccagctactgaccctgggtctctgtgctcatctgccttgcagagctacagggagggctaatgaagcgagaggcccttcctaaccctcaagccctccatcagagtgcattttgctctgagaattagaaggaagaggagctaagggagtgccttcctttgggaggaggaactgccctaccctgccctccccacagccctggccagctctgccaggccaaggaaggttctcctcagctcagaagcctggtgagaatggcaggaatacaggatggaggagactctggcccccctttacccatggaggctgtccataccagtccccatgccatcctccaggtacacctgtcagcacccctggaaaaaccacctcgaaatcaagtgtgtgggcccttgtcatggtggaaatctaagatctcatgttcccagagaagtggtcccacattcacctacctcccaactgcttagccagccagcaggtattcactgggcctgttctccctgcccattgcattaggccagacagaggaagatgtgatcaacacataagaaacagtgaaaaataccctgatgaaatatgattgagtgctaagtaatattaaccgtaaggacagtctgagtgcagtggctcatgcctgtaattccagtactttgggaggccaaagcaggcggatcacttggggtcaggagttcgagaccagccaggtcaacatagcaaaaccccatctctacttaaaatataaaaattagctgggtgtggtggtgcgtgcctgtaattccagctactgggaaggctgaggcgaggcacgagaatcacttgaacctgggaggtggaggttgcagtgagccaagagactgcaccactgcaccccagcctgggagacagagtgaaactgtctcagacaaacaaacaaaccccagtgagggttacagggattcagggaagggaagaggtcattgtggactggagaaatcttggaaaccttcctggaggaggcagcagctcttggcctcaaccctgaagaatggactggggaaatcacagcaggaacgatgacaggaaggaaggaaggagcatggcaatgtcccttcctaggggacacccttctattagaggactgtagtgaaagtggggtgggctgattgtggaggtcgaagggttgaagacttgagaaatagccagagggtatctgacatgatgggggagacaatggggagccattggaggttctatggcagggtgtgatcatgattaaaacagagcttagtccttacaggactagtaagcaggtgaaggaacagcaacaggagatggaacagacagaagacaacaacttccttcccagctccagcaggaattctcacttcagcctcagggactgcagaaatgtctcattttccccgttcacttattttccatttctttcattttgtgacattctgagtcgtcttaaatcttgggggagggaaagcctgaagggggtaatctgggagaggctcactcagtaactgtggtccaacaagggtgggcaaggagaaggaagttaagctggggagtgcgttcccagggaagaagccccccaggtggggcacacagcctaggggaagggctggtgcagcctggggtctggtggcagctcctccttctggcccctgccccaccttccagccacatttcctagctgctttctgcccacacccgctgtgcaccaccacaacaaactcccattcctgaaaagcccaagtgtcttgtgcctcgagaggtatgtgcctgctgtattcctccctctgaaatgccttcctcagccctcccctaaattccagttcaaccgtcaaaagccagaagccacccctgctgatgcgtagatgaccccaggcagcattcgtctacgccccattcagggcagctctttctgcaggtgctatgagccctcatcctatcatgggaaaactaggaatcctctatgcctctggtagtcccagtatcttacatgtcactcagctgtggaggcttctggaaaccggctcagtaaaggtgccctgaatgaaaggttgcaggcgttgcattctgagattaggaagcgctggctggcccttcaagtgatattgcctggggaacagctggagctgggtcctgaaggctgggtggtttgtcaggaggggaggtgccttttttgggaggaggagggtacttggatctaggagggtgggtaaggggtcagtggatcaacactggcagagggtggggggtggagatctggggatgcagctaacagaggttgccgcttgagatcagctgaaggaggtggggaggaacctgcagcggccttgggaaggcccagggaggcagtttcagaagggctcaaatgtcagagagcaaaatgagactgagaaaagaggagaaatgtctgtgctgttgttacaccacttagaaaacattacaaaaaattagccgggtgtggtggtgcacgcctgtaatcccagctactcgggaggctgaggcaggagaatcgcttgaacctgggagatggaggttgcagtgagctgagattgtgccattgcactccagcttgggcaacaagtgcgaaactccgtctcaaaaaaacaaaaaccaaaaaacaaaaacaggcctgataggccgggtgcagtgattcatgcctgtaatcccagcacttcgggaggccaaggcgggcagatcacctgaggtcaagagttcaagaccagcctgaccaacatggtgaaacccccatctctactaaaaatacaaaaagttagccgggtgtgtcagcaggtgcctgtgatcccagccactcgggaggctgaggcaggagaatcgcctcaacccaggaggcggaggctgcagtgagccattgcactccagcctttgcactccagccttgacaacaagagtgaaactccgtctcaaaaacagacaaacaaagaaaacaggcctgatagcaacagctactactcttgagtctgagggcgacttgggaatcttgaaagctacctgtgttttccccattcttgatacctgcatctagccccttcctaaccccaggcatagcccaggaggagactgtgtgacagtcagggcctgggccccacattggaataggaaacgtaaattctaattccattctagtcctgttcccaattcttcattgggagcttgtggccagttataaaactcggtagccccaagtcccctagtctgaaaatgagatcagtagttctaaaacttgtactggaattcatggattctttaattacagcataggaataaggaataatgttattagcagaaaatatattttgtttggagatctccacattgcaagtcaagtgtactaaagtcttttaaattaaatcaacattttggtttttctaataatgcccactgctaccttcattggttgggagtggggatgcaaatgccaagggttgaagacttactagaaaatcttttgataattgctggagccaggtgatggcaatgggaggtcgttacactactctctgcttctgcatatgttagaaaatgttcatgagttttacaaagtctgttttgtttttttgagacagagtctcgttctgtcacccaggctggagtgcagtggcacaatctcggctcactgcaacctctgcctcctgggttccagtgattctcctgcctcagcctcccaagtagctgggattacaggtgcccgccactatgcccagctaatttttgtatttgtagtacagatggggtttcaacatgttggccaggctggtctcaaactcctgacctaaggtgatccacccgcctcggcctcccgaagtgctggggttacaggtgtgagccactgcgtccagcccaaaaaagtctttttaaattttagtagagacctaaaattgagaaaatgtatctatgatctaatttttcctgggagttgaggaaagaaccctttttttcactgtaactgagggcaggcctccatactgcttcttcaagggagcagagtttgagaatcatggaatttctgaaagttcttccggttcctaaaagtcatagtctaagcttcttgccccagggctaaatgagaacagaaacacttcgctcacagaaccaggagctaaaaagcaaagcccctgtttctgggttgcggggaacccaggagtgcagcgactgacttggagagaagagccccattcctgaatttccaccccaaacacaacattccacgcacaggggtaagtgcctctcctcccagacctcagacaggctgccctttctccgggctcttccgggaaagtaatttctgccttcctggatcccagaggaaaagaaaacaatcaagcagccagaacccccaccctgttctgcactttctcttttttttttttttttgagacggaattttgctctgttgcccaggctggagtgcagtggctcaatctcgcctcaccgcaacctccacctgtcgggttcaagcaattctcctgcctcagcctcttgagtagctgggactataggcacgcaccaccacacctggctaattgtttgtattttttttttttttgagacagagttttgctcttgttgtccaggctggagtgtagtggtgtgatctcagctcactgcaacctccgcctcccgggttcaagtgattctcctgcctcagtctcctgagtagctgggattacaggcgcctgccaccatgcccggctaattttttgtctttttagtagaaacagggttttgccatgttgggcagactggtctcgaactcctgaccttaggtgatccgcccgcctcagcctcccaaagtgctgggattacaggcatgagccaccacgcctggctaattttttgtatttttggtagagacaggggttcaccaagctagccaggctggtctcgaactcctgacctcctttcagcttcccaaagtgctgagattacaggtgtaagccaccgcgcctggcctctgttctgcactttctctagagaaagctctcacacaaaggcgaacagacaaacagggccgccttcccctggaggcctggggtaaagacgaaatgagagctgagttcacgtgaagtgccccacgtggtggcagtttcctctcttttcctgtgcagctaggtcaccacccacttctctttgtacccagttctctactaatcaaacatacaagacagctcaaaaattgtgcgtggcgagttgatttccctcctcagtctttcagcctccattttctcacctctctgcatggctgaagccctccacgggctgttcccacctccccgacccccacagaagcttctctataaagtcaccagctcctttccaggttgtccaacgccatgggcatgtctcagtgaattcagctttccctagggctgggcagccaccctctgggaaaaccccgtgcttccccagacaccgctctgtactgctttctccctcagtccctactgcctgccactcctcctctccatgtggcccagaaatgtcggggttttcatggacatgttctgagacttcgtctctcctccttctccccttgctgagcccttaagttcccatggatttaaatgccagggttctgctctcaaatcccacctctgtcgcccgtacttccctacagcccagactccaggcacctggcatctcacacggagccctcaattcccacctgtcccaaactcatcctcccctgggtcttcccatctgagcaaatggcacaaccatcaccaggtgttcaggccagacccctgtgagtcctccttgagtccaccagttcccctccctgccggtccatcagcaagccctagctattctagctccaaaatacaccccaaagctcttctctgtctccactgctgcctctcaaatccacatcacatccttcctgtgcacagaaaccttctatggctgcccagtattgtcagaagtaagccagcttttgggcagactctgcaggtctccaactgatgtgtggagccccgcctgcctctctggctgcatctggccctttctcctttgccatttcaccctggcatacagtttgccaaacaagtcaaggccttgctggtgctgtttcctctgcctagaacactctccctgaccccactcctcacagagccagctcttcggttccttcagaccttaactgaaatgccacctcctccaagaagcctgtcttgaccaccccaactaaagcaggcctctgctatcttctatttcagccccttgtttctttatgttctgcctgtctcccccatcagaatgtcaactccatgagagcaggaaccgtatacgcccagggtctagtacacagccaggtatacagtaagtgttcaataagcatctgctgaaggagcagatgaaccagtcatcatgactagagattaagaggctcccagtaagttctaagggttagcctgaaggggaaactgaggcccatcacttctggttttccagttctgcaggacgggctggggcccaggccagaaggcgcctcacctcccttttccagcgtgccagccactcgtcccgcttgcgcttgctgatgtagtaggggtcccccgcctggaaggtgagcctcggcatgggccgctgacggaggctggactcccagcccaagccaccccgcagccggccccgggagccctaggacagagagacagacattagggcattagggtgggcactgacggacccaccaaggaggcactcgcctcaaacacaatgtggacactggctcctggccagagagggcacccctgggagtgctgggcaggccccgtgtgggctggaggagcgaggggcatgtgtggcgggggtgggggggcacatggacacggccacaggccacgaagggaggcgtctggcctctggagggggatgagccggctgccttgttgggggacttccaacctccacgcccacttcctctccttcccacagagggatgtgtaaagaaggaggaggggcccaccctccgccccctcacacacactcgccacccgtgtccttcttctagaatcaggatccacagagcccctgggggtggaacacttgcctccattttcatggattcgatgttggtctccttctgttctttgcctgtggagagggaagaacaaagggaccagttcgttggtcggcagaattactggagtggctcacaggccccaccttgtgcctggggtccctgccacaggggatgggggtcctctggccgtttagctgttcatgtgttaaatatgatggcccaccacatgccaggcacagtgctgaccctgaggacccagcagggcctagggcagagaaagaactcgggcaggggcaggccttgaggcccaggcaagagggaacacgaggaaattcagagctgggtttctggcctgtcaactctgtctcaggtacacagaaggggactaaaaatacccccattctgctgctcccagtcaagagacctccttccccaaaggaggagcaggaaggcagagggggtgcggaaggaggagggggtgcaggaaggcctgggccagagggccagcctgagcggcctccctggccctgcaagggagtgtttgcagaggccttctgggcataagggcatgtactggggggcggtgggtaccgggccaactggaacaagaccccggtgaagcaacttcctctctacgagactcagtttcctcatctggaaaataaggatgctggatgcgatttccaaggtccgcctgcaggtccaaatattatgattctattactaatctcattctccgtccctccactccctgccccatgctcaggcccctgagctcagcctttaatctagaagacttgagtttggattccagtgtgacctctgtaacctctcctggcctgttttcccactgaatcaaggtagataaatgttctaaaatcattaggttatggtgagcattaagtgcctactgtggggcctggcatactgtaggtgctcaatacatgttagtgtggttctccttccctaaggattcatttcctctactgggccctgattccaggtcctggcagggaagtctcaatttccctattgagaccttgccctctccctgtgcttctccaagcccccagcatgaggggagctgcgctcctcccaggcatccccctgcactccccaccaggtcctcaccaccctttccaggcaccccttccaggcccagcgccccggaggctgcggggctggctgattctgcctcccatagcttcttgctggaggtggggaagtgagccctccttccacctgggcccctgagcttctttgtcgggaaccgacagcgtatcgggcctgggcccactgcaggaaggtcactaaggctggctcatggtagcttggggtggggggagacaaagagcctgaaacggaaaaaacagccccgacttcatctcctggctgtgaagcggaagccagccacagtgttcacgccgcgggtcctcagcccgggaggccactcccttccctcgtgacaggggggtcctggactggttttgggctgaccccgggcgcccaggacagcgctgtcctccgtggttctgtccctggtgacagcgactcccgctagctaggcccgggagcaccagggggagggaggcaggagggccaccgtgggtgcgggcctggcgccgggctcagcccgcgggggccgcgtgggcggggacggggcgtcttgtcgcgggcacctgtgcgcgtgggcgggcgcgcactcgccagcgctttgttcgtgaccggccttttaagggctgtctcacccatcttgtctggctctgcctccctgtttcctttccgtcctctctcccaccacagccagctccccacttttttcgcgggggccccctccagcctgtccggggcctccccgttcccaggccagggcttccccctcctcccagacctcgttgctctgcccggtgaggccccgggctcccagcagggggcgcctgctcgcgatcaggtggcggcctgggggcggcctggcggtcccggcggaccctgacgcggcggggctccggggctcgcggtggcgctgggaaccactgtgtcagccctgcggctagggcggggagtggaggacccccgggctggctctcggacctggacttggggcttccgactgcattttctccccagcccgctttagaacctcaaacgtttcctacttgggaccctccatggcatttaattacttttacggataattatttattcattagaatattagaaaatcagggttgaaaggctttgcagagatcattgagtacttgttcagcacttaaattttgcagaaagctgagacctggggggtggagtgacttaaggccggagctgagatgagcttttcaggggtcctgatgccccggcaagctccctctccgctgcaccactactgttatttctcaatgtgacccccttcctaatttcccagccccccaagctccccaaaacagaacgatttttccctatgcagtttccaactggcttctttctggaattttctccctgacagactctgcgcatgcccacttgagtgatcacacacacacacacacacacacacacacacacacacagacacacacgctttccagcctggccgggccgcctcggaatgcggcacttgtcgtgagtcagggagggtcagctgctctctcagtacggcctatgcagcccaactgctcctggcccaggcccagggtcaccgccagggccaggtggttgtgaccttccagtgtggccctgacaggcccgaacatgaccctagtgcatctcaggacttgggggcaggggaggccagggtgcttctaacactcgccttcgagtctgagctatactcagccagaggccacccaagttctctttaaaatgaactcaaatctccatgaccaggctgtagccaggtttacctcagagggcagtcactggcctgaaaaggggccctatgctcagagtagagaggggttttgtgctgaccctaatccggtctctcaccagttgcataatcttgggtaagtaatttaacctttctgaagcttcagtctccccatctgaaaaatgaggataataagagtcttccaggctgagtgcagtggctcatgcctgtaatctcagcactttggaaggccaaggtgggcagatcacttgagatcaggagtccacgaccagcctggccaacatggcgaaaccctgtctctactaaaattacaaaaattaaccaggtatggtggctggcgcctgtaatcccagctactccggaggctgaggcaggagaatcgcttcaacctgggaggtggaggttgcagtaagccaagattgtgccactgcactccagcctgagcgacagagtgaatgagacgctgtctcaaaaaaaaaaaaaaatcttcctcccgtgatcacacatggggcataatacacagcagagcttctgaaactttcatatacatgggaagcatgaggccctctttaaaatgcagattctgatccagcaggtcttcagtggagcctggaattctgcatttctaaattcctgggtgctgccaacactgctggtctatggaccactgtgagtagcgaggagagagaatgcccaatacagtcaatactcaataagggaaagccacatcgccactgccacctgaatcatcatcattatggcattaatgctggcgggggcaggaacagacccaagacaagcacaggcctgtcgggtgttggctcctgtccctatcactcatctcatcatctcccgtcttcctgattctttctcctggctgtactttcagcacatgctcaggctacaagaaacgctgccttaaaaagtctgtttttgctgtacaggagctaatgaaaggggttccaggagagcatcccctgaaaagagacctggaataaggggaactgaaaggagaccacggccgagccacatcctctccggggccttagtctccttcctcatctgaatcaaccagctgagcatgtgttctatgtcagctgactgctggaaccgtgaccgagcctccacaccctgattaagccactgtccgttgcatattggcagagcctaggccactgcccaccccgcgaggtaacatctcaccaatttcagcttccaggcagtgcagtggccttcagggatcctaccagctctgatccctgccagaatctatacttcctggatagctgggaccacacaggagtgtaccaaggccaaagtttgttttttttttttgtatttttttgagatggagtctcactctattgcccaggctggagtgcagtggcacaatcttggcttactgcaacctccacctcccgggtttaagtgattctcctgtctcagactccggagtagctgcgactacaggcatgcaccaccaagctcgactaatttttttttgtatttttagtagagacaaggtttcactgtgttggcccggctggtctcgaactcctgacctcaagtcatctgcccgcctgggcctcccaaagtgctaggattaccagcatgagccactgtgcccagcctcaaggccaaattttggaggtcaaggagacttaaagagtttttgcccaccacactcagcactaagattctaaggaagatccacctgtctgaaagtcccagacccaggaatcatccttgacagcatctctccctcacctctcatgttcctggcatttgtcccctcccttcatctctgctgccatcctgctcatcagcccctccgatgtcatcctgcttcccagctcctccattccatcccaggatccagatgacatgagcttttcaaattgcaaagctgattacatcacacacactgcccactccccgcctccccaccccccgcctccccgcccccccaccccccaccccggcagccacctttgaaggcctggcctgtctgccccagcactttccacacccttctcctttgctctctgcactctagccttgtgacatctatcagttccctgggtgccctgctccctcccacctgggagccttcttccctgttctcactctctccctctacccctcacccagtggactcccttcgcccttcagctcgcgctggacagcccaggccaactcaggttcttcgttgcagttcccctggacatgtttcacttcccttagagcgcttatctccatgtgtaatctcatctttttaagggtggatttctcattaatgtctgtctctccagctgactgtgaggtccttgagggcaagaagcaggtttttgttcataatagtttccccagtccctggtatggatcctagcacaccctgaatgggtgttttaagaaacacctgttgactgatcgatgcaggagcccttgagaacagctagaaatggaagtagggaaatcccaaagtgaaaacaaaccctcaaggccagagaacagctttggggctatggctccatgcttcagggcaggaaggaatgccgtgaccctgggtagcagctcggcaggagtcatggtggggtcctgggaagcgaagtcaactgcagtcagcccatgggaagcaccacatttggaagggcagggctgatgggttctctcacacacctggcattgttaatgggaaggatggtgtcttctccctttcctcatctgtttcactcccctcaggcccttcccactctcgggaagtatcagaatatgtgcaagaggcctagacaattcaggacccgtctccgcaccaagtcccattccaggacagcggaaaatagtagaaaggcacaagaccaggactgaatgagccctggatctgccacttaaggttggggctccatgagcaagtcacatcattgttttaagcctcaatatttttctcctgaaatgaggataatcatatctcttgaataagattgttagaggagtaaataaaacaactaatacagattccctctgtagtgttctgcacatagtgggagcatcatacatatttgtcgaataataaatgaataaaagcttcttaataagtttggaaatttgtattctggaaatgttctctatcctgcatgaacattaggttggatccatgcaaaataagttacgccaattaatcaatttactcatttcatcatacacgcttggaaggaagactttttgaaattaaaatgcacatatgcaaaacaacctggcagggccctgggaggatcaaatgtgataatgtatgagaaagcgctttgtaaactgtgaagccctgtacaaatgctagttgtcctcattactaacatgtttacagctcggttggccctgaaattgctggcttaacctgaaagagaaaagtgggcaactttccaggcttccagggttaggccaaaaagtccccagatgaagaggcctgggctgggcagtacacagaatacaatcacccagccctctccccacgccactgtcacaaccaaatttccagttgagtcagcccaactagggtgggctcaggacctctgcactcagggaggcaaacagggtatctgctgcccttgagtgcccaggccaggggctacaaatacagcaacccccaggaactgcatggcacgtgggagagtaagcaggccaggtagagctgcagaaaactaaggcccacaaccagccacagaaggcgatggagggaccgccattatcccagtctagcaatcgttggcgttatgaaagcccgctgttgccagatctagcttttttttttttcatgagaagccaaaactccagatttttatgtgaaattttttgatttttaaatactggcaactaattttttaaatgtttaaaacactctatgggccaaataaaacatatgcgcaggctgcatccagccagtagcctccaggccatagccttggcaagcagacctttagccacgacccagaccatccttcctgggacctgctggagagccaagtccctgactctcagggtatgctggtgggcccagaagaggctgcccctggtgctgaggactcacccgcttctgcaggggctcctcggccctccttgggggtgcagcagccattttccactgctcttgaggcttcaggcagggtctcagctgcaccctctccctctgctggggccccgcccttctgccccccagcagggctcccctcctctggctggggctcactccgcttctccaagtccccattgggtaatagctctgaggcgcctgagtcctgggccatggatggggacttggagatcaccgcagggtcctttggcgtgtcaccgctttccacctgcaaatgtaagaaagatacacaagaggagggttagatcagtgggcttagcctgttttggatcattgaccgctctgaaattctagagaatgttatgcactttctgtccagaaactgtgttcatataaaccttcatgcaaacagatacattcacaattttgctttcaacatcaaaggattcctgggcttgaccccttgaaatcacgagtctgtggactccagcttcagaaacaggaaaagaatccaagcaggtttgccagcctggttgcacttctcaagggatcggctcccccatcccaccgccactcactgaggttacataggacgtccaagccttctctgcagcccctgttaaaaaagaaatgctccggccaggcgtggtggctcacacctgtaatcccagcactttgggaggctgaggcaggtgaatcacttgaggtcgggagtttaagagcagcctggccaacatggagaaaccccatctctactaaaaatacaaagttagttggggatggtggtgcatgcccgtaatcccaggtactcgggaggctgaggcaggagaaccgcttgaacctgggaggcagagtttgcggtgagccgagatcacgccattgcactccagccttgcgacagagcaagactccgcctcaaaaaaaaaaaaaaaaaaaaaagctccttgtgccacccataatccaataagacccccctctcccttagaagattccagtgccaccagatcaagtctgggactcaggctggtctgacttctgtggtcagtgccctcccagctttcctcttggtctcttgaggcatgagagtcgaaggaggacccccaaaaaaccattctgtaggctcatagcctagcgtagccttctcccctggcctgggccgccccagattctttcaggcactcagacccagaagagccaaggctctggcaaacagttttcaggctctgcaacaactcttcctgagcactggggtctctcattctcccttcaagggaaatcatttctttatcccctagagtctaagaactgaactcgctaaggttccaggtaataaaaatcaaataaagaataatcctggctgtctgtgtgtgtcactgcgcagtggacaaagctcctcacttactacctcctcagagtttctcagcctccctgggaagcaggtgaggaacctgaggctctctggaattttgtgatttgctccaggtcacaggctttgcaaggacaaagcaagagcaggagagccgggtgcctgctgtgtgctctgctgtgtatatatattcagtcctcagccatccagaggcaagtgggccaggacacctcaagaagaatggaggtgtccagtgtgggacaggaacaggcaggggtccccatggctcggcactctgccacacccacaggcaccaggctgcactcagcaactctgcctcgctggctccgtatgcagaacacctacccagtagaaaggcagggacagcatcagcacggcaagcctcagataaggaaggcactgctctcagcatctcagtttccccacctgtcaggtggagatgactggtctagaccaatggagattttgtctttcttgtctttttttttctacttataaaagtcagtcacatatatcataaaaaaatcaaactgtagccaggcgtggtggcttacgcctataatcctagcactttgggaggctgaggcaggctccctcacatatcacctgaggtcaggagtttgagaccagcctggccaacatggcaaaaccctgtttctactaaaaattagctgggtgtggtggtgcatgcctgtcatctcagctatttgggaggctgaggcaggagaatcacttgaatccaggaggtagaggttgcagtgagctgaaactgctccactgcactccagcctgggcaacagagtgagactccatctaaaaaaaaaaaaaaaaaaaaaaaaaaaaaagactatacaaaaaaaaaaaaataatgctaaaaggttaaagctcctatttcagctccctacccccaaaatctctcccctaaggtacccattattaacagttcagtgagcatcctttccagattttttcctatgcattgacaatcatgtgtaagttacatgtttatacatatgtattcatatacacattcagatccagaaatgtttttttccaaaagggtatcatactagtcgtaatgttctgcaacttgctttttcacttaacaagcagagtgggcatccctccatcccagtgcagatggatctggatgctccaaaatgtatgcatgccgttccctgatggtgggcatttgggctgatttgcttttcactgcagtgaacacccttgcacttacagctctgtacagctgcgtgtttccatgggacggagttccagaagtggtcaggccgggtgaaagggcctgtccagctaaatgtgcagagatactgccaaattccctccagagtttcccaccactcaagtgcacagcctgagacagcactgggtccccagcccctcccctgcaaagccctatttccaaggctgcttttgctctaacggtctaggacctgaactctcaacccactgttatttggcaaggaacgcccagaggtggcaattagggacaagggccttgggaaaacaaaaacaaaaacaaaaccagagtcttctcaggtatgctttcctccctggatggggacccgggcacagggagcagccggagagggagcagaaggaactgcagggcctgccaagctcctttcctgctgtgcggggcagctgggcaggcctgcttccaggagggaagcacccacagaaagctgcatgtgtgtactcctcagcagttggaggcagggggctgcaacgagaggaagaggaggtgactggtaaaagcgagaagtcctccactgtgcttgggggcttgggctgatgccagcagagccaggaaggccaaatccgggaaggaaagtggaacggcagacccctgcctccatcctgtgtgtcaggaccctccccagaactcagaacacctctcctccctccctgcttaagcaaagagggcatttccagcctagaatggtcctccctggtgtaaaccctgtctgtcacccttcaaggctcagtcatgagccccagcagcctgaaaagtggagtgtacccctgcactgcagccaccttctgggatccagctgttccaggtaccccaaagcccccaacatggcactaccatagaggtatgcgtggggtcctgcctggctaacttgagctaagaagcttaggtcagagccagactttttcatggctgcgtcttcctttcttctcatcatttgctgccctgcagacacctcagattggggcaggctctgagccccgcaaagctgctggaggcaactccactgtcactcacttcctgcctgggaccacatggcctcctctcatgctgggactcacttcctgttgactgctggctccgtagcatagagacctatgagggccggctctgaggcccaacacagccccaggctcccgaccaacccagtccttcatgcacaagagtaagccctgccctggccttgcccgcggaccccagtctgcaacagcaccagatgcgccattctcccagagatgcccccaaagccaggtgggagccgggcatgctgggcagatgatgggcgagcggggcatgttgcacatttccagccccgggttagctcacccgctgaaatccccactcccgcatctggtccacaccatcctctgcccaaccatcccctcctgctcacctgctctctcaggttctggatgagatgattcagccaaagttctgggatttgggggggagggcaatgacttctgccacgctcaacccttgattcatcctacccatcaagaactccctcaagctaagtgtggcccctcaatggggctctctggggctcagggtgaccagcaggacaaaaccatccagaggaaggaaaaaggtcccagtcaaatggcctgaagcaactgtccaagtctctggggaagagctgggtgctcactgaaggagccatccctggtgagaagggcagaaacctcagcctggaagcccaggagggaggggcaccccagccaggcctggcctcttctgcccccaactccatgtcctcctcccagccactctcctcccctcctttcccctgtctccacagcttgttgacctctggagggcagagactttgctcgatctggagggcagagactttgctcgatccggctagacttagcagggagtggggcacctgacaggtgctcagacaatattcacaattgattcgtgaatggcaaagacgaggctaaaagtgagaacctcctgcactcaagctagagggagtttcagctttgctgccatgtctgttaaacaatctgcttttgtttgcttttgacagtcatcttgaaagagacacagcacacccccgagatactcatgttgcccattatctgggagagggctgggttgggggtgccgaccattctagaaggcaccaccagcaggtgcagctgcaggtgacaatttcagaatgggaaaagccgcagtaactacccatcacttctcctcccgtggggggccagatgggggccacaggagggttgtgaatctagtatcattctagatttcagtacagcttggtcctatcacccactgtccacctacccccacccggtataccacactttgggtcttcaaatcctgcccaccacttcctggggtccctccgagtttgccaatcttcgctttccttctgggcagaacccccaccttgcctccggcttttcctcagtcctctcctgtgagcagctttttgaggcaggttaaggccgtagttctcaactggggcgattttgctaactccccaccaggacattttggcatgtgtgtgaagacatttttggctgccacaaggttagggtgaggtgctggcatctagtgagtagaggctagggaagctgctaaacaccccaccagacagaggacacccccgcccccaacagagatttagtccagacaaaatggcaataatgtctttgaaaaaccctgggctgagggtaggggcaaggacagggactgtctttatcaaaggaacacttttttttttttgagatggagtttcgctcttgttgcccagtctggagcacagtggtgcaatctcggctcactacaacctccacctcctgggttcaagcgattctcctgcctcagcctcccaagtagctgggattacaggtgtctgctattacacttggctaactttttgtatttttggtaaagatggggtttcaccatgttgtccaggctggattcaaactcctgacctcaggtgatccacccacctcagcctcccaaagtgctgagattacaggcatgagccaccatgcctggcttaagaaacactttttttggccaggcatggtggcttacgcctgtaatcccagcactttgggcggctgaggcgggtggatcatgaggtcagcagattgagaccatcctggctaacatggtgaaaccccgaatctactaaaaatacaaaaaattcgccaggcgtggtagcaggcgcctgtagtcccagctgctggggaggcagcaggagaatggtgtgaacctaggaggcagagcttgcagtgagccaagatcgctcacttttttttttgagacggagtctcgctctgttgtccaggctggagtgcagtggtgttatctcagctgactgccaccatgcctggctaacttttgtatttttagtagagatgggatttcaccatcttggccaggctggtcttgaacttctgacttcatgatccacccacctcagcctcccaaagtgctgggattacaggcgtaagccactgtgcccggcctagaaacacttttttaaacttctaaaaacctggggtaaaacatacataacatttaccattttaaccattttcaagcatactttaagtacactctcatggttatacaacctttacccccatccatctccagaacttttccacgatcccaaacggaaactgtctccattcaacactaacttcccagttgcctctcccccagtcaccactcttctactttctgtcttctaaggagcattttaaaggaatgctcctttaaatggaaggatctggacccctcagccccctgtagttggcaggtgtggacagctgctggcccagccttgccctgaagggtgggggtgaacccaccgcagctgtcactcctgtcccagccaatgcatgccacgtttgtttacaaagccctttctcacccaatctccttacaattcatacctctgaatctaattatctgtttactgtggcctccctcctcgactgtgagccttgccttatttaacttttttttttttttttgagaccgagtctcgctctgttgcccaggcgagtgcagtggcgcgatctcggctcactgcaacctccacctcccggattcaagcgactctcctgcctcagcctcccaagtagctgggattacaggtgcctgccaccacacctggctaatttttgtatttttagagatggggtttctccatgttggccaggctggtctcaaactcctgatcccaggtgatccatccgcctcagcctcccaaagtgctgggattacaggcgtgagccaccgcacccggccaatcttatttaactttgtaggcctctccacctatggctctctagcatcccacacaggactgggcatacatatgcttataaaattaataaatgtaattttcacagggatcctaggggagctggagcgatactcgcttttctgaggcctgccttgggtcacacgcctctgatcagtaaagcttccaggatggctcaggtacaggcgaggcatttgaaggccgactcccgctctgggttgagtctcagaaaagcgcaagctcacaaatgcccccagggtttggagaaggcagaggtggcagtgcagtgcccaagaaaggccgggcagaggctgctggccctcccctgagcagcgctcaattcaagcaaaagacagaggcaaggcaaggaggagccctctgctgtggcctgcccagccggaaccaattccccagccctgccgccgcctcctcttccccctttgcccaaagtctgggccagacccagacctcctgcccctccttcactccaggcaaagccttgcgtcccagggtggggcaatgtctgaaactcccaatatggggaggtgattttttctttcttttttttaagagacaggatatccctttgtcactcaggttggagtgcggtggcacgatcacggctcactgtggccctgaattcctgggctcaagcaatcttcccgcctcagttttaccagggactacaggtgcctgccaccacacctaactttttatttttatggaagtaattaaaaaaaattttttttttgagacaaggtctcactctgctgcccaggctggagtgcaggggtgtgaccatagctccctgcagcctcaaattcaacgattttcctatctcagcctcccaaggagctgggaccactggcatgtgccaccacatccagctaattttatggaagtgattttttttttttttttttgagacgcagtctcactctgttctccaggctggagtgcaatggtgtgatctcgtctcattacaacgtctgcctcccgggttcaagcgattctcctgcctcagtcccaaccagtagctgggattacaggcgtgtgccaccacatccagctaatttttgtatttttagtagagatggggtttcgccatgttggccatgctggtctcgaactcccaacctcaggtaatccacccacctcggcctcccaaagtactgagattacaggcgtgagccaccacgcccggccagaagtggtttttaagtgttgctttactatagttatttacacagaaaaactaaaatccaggaggaggagaggtgaaggtcatggcacaggggagatgaggccctggcacctggggcaagaagccctgtccccaggctgcagcccacctgcagcgatcaccggggaagggggatcctgtgggggtggggggtgggtagatgccattctccctcctcccctgcctcttcctttcccactgggagctcctcttgccttctcccccaaagcccagcagatgcaggggcgacctcaccttggtcacccagagggccgggcctgccatggtgcttttaatgcctctgtgagatccattccatgccaaccgggaaccctggcatcaggccagccacggactcttcaccgtcacgtgcacagacttgagaaggaggcacccccacgcctgcagacacccactgccagccacaggacagaggggtgcaaggaagctgcgtgatgccaacacaaacacgccagtgagcccctccactcccaccgcaactcctcgctccttccagttcctcagctctgcaggcccatcacccctcaaccagcctgaatttttccaggttgactctagtttcaggaaacagctgcatgtccacgtaagcagggcagctctgcccccgaagcattggcacggggccatgactgcccgcccccgcccttccggcagccccctttcccctggcggccctcaccagagatctgatagcagctggaagtggcctgtggtagggagagccagagatgcctgctccatgcccactccaggaggggccagggggtccccagatgcccccttgctcggccttcctggggtggatggagcaagctccaacgctatggagctaggaccctgactcctccaatttcccttttccctgtggggtggctaaaagcgcagccagtggggtcagggatggcgggaccagaggccacagagggccgactctggaaactctggtcccagcctgggcaccccctccaggtcctaccattccccttaccacatctgctgggagctgcctgtctcccttctccccagagatctctccacccgtgtgtctgaggagagaactctgggctctgcaaagccttagaggtcactcagtccatggcctggctaggccgtcacaagccatggcaaatggatgccagaatgaccatgcgtggtgagtggccggcccactcagggttctgtttccagcggggacactggtccacctggaaaagggcctggttgtgctctttgaagtcaacctcaaaggatttcagagtgagctggaggctccctttaaaaagccattatgctggctgggttcagtggctcacgcctgtaatcccagcactttgggaggccgaggcgggcggatcatctgaggttgggagttcgagaccagcctggccaacatggtgaaaccccatctctactaaaaatacaaaaaaaatggcctttgagccccctatgctcaggcctgctctcacattgtgtagtgtactttcattttcaataaatcccttcgacccttaaaaaaaaaaattagccaggcatggtggtgcacgcctgtaatcccagctactcagaaaactgagacaggagaattgtttgaacccgggaggcaaaggttgcagtgagccgagatcgcaccactgcactccggcctgggcaacagagtgagaatctgtctcaaaaacaaaaacaaaaacaaaaacaaaaaaagccattacgtatgagagatcccatacgttaagtaaatctcttttgaagttgcttctgttttcaatttctgccaatcctagggtgacaggtttggtaagaagggaacccaccatggaaaatggtgctatcttttctgtgcttcatttatctttctgaaatttctaatgggtgtcctccctctgccccccagctgtgctgtgctcagcccgccgcacccgacatgatttcatagccttaatcacatcctctgcctttgtctctgcagactggggagtcctaatctctttagcctgtcctctcttggcagccttgccttccccttgatcaatttagtgcccttctctggagcttttccaactcgcttatgtctttcttgaggtaggagaaccaaaatgtacaaaattctctaggtggggatgatgaaagaaagcccatgtcaacagctctcctccaatgggtgtgccggcgcgtacctgcaacaggaggaacaatgcaggtggagcccgggccctagaaaagctcatggggccccaggaaggccaccaaggccaggacctgtgggaatgaatgactcgctgaaggtggccctgggatgtggagagatgaaaataaacagagggattatttttggaaaaaaaaaaaaaggagattctgagattctacttaaatgctccccaagtaagaccagctatgtaaggtggccttgacaggggccccttccccatctgctcccttccagaagccttgtctctgacaacaacgctgatgctgtccctgttgtgccattgctagggcttcctttcaccccttcctctccagcgttcccagggccagcagcataggcttggccaattctgccccgccactgccaccccccacaggccctgggactttgctggcgcccctgccccctcccctctcccagcatgtgctcatgctcagggatgaacgccatgctcatgggtgccagagccaatttctcaaacacgactcccatcacgtcatatccgcctcctcacaaccttccagataacacatttttcagagaggataaagagtaaaagcccctcaggctgcctgcaaactacctttccaatcaagattgagaagatttttcttctttctttgagacagggttttgctctgtcacccagctggagtgcagtgacacaattatggctcactgcagcctcaacctcccggggtcaagagatcctcctgccttagcctcccaagtagctgcgaccacaggtgtaccaccatacccagctactatttattatatatatatataaaaatttatttttttgagacagagtctccctctgtagcccaggctggagtgcagtggcacaatctcggctcactgcaacctctgcctgcccaggttcaagcgattctcgtgcctcagcctcctgggcagctgggaccacaggtatgtgccaccacattcggcttttttctatttttagtagagatggggttttgccatgttggccaggctggtctcgaattcctggcctcaagtgatccacctgcctcagcctctcaaagtggtgggattacaggtgtgagccattgcacccagccccgtatacatttttcaatgaatccctagtcccctcagccaggcctgtgcctgtgtgctcatggcccctgcctttgggcctccccacactcaccctgccctgcatgccttccttcctccacacccagctcagctggggtcgggggtgcctctcactttccccttgacttctccaaatgtcacctcccttctaaggcccaggtcaagccccacctcctccatcttccctggcttccccggcatccttaggagtcccactgcacttaagtccccaccatgggctaggcccttccatgcagcactccagtagcgggcgttgatttcaccgctcaggtcggggagtgggtgggtggagctgcaaggttcataaccataggctctacctcacaagcagtgtgtcggcctgtcttcctcatgccttccaaaacatgaggagacagagtgggcagcagcgtgtactgatgcaggctcgcaggaagaaaagccacctctaggggtgggccaagggctgcagcccaggagtgggagacacgatgtcaggaagttatatgcataaaaggtaggggcaccatatcacccagccgaggtccggagggttagcccaggagcggctctgatctgaaaacaagcagggctgctgagctctgtcttaacttggagaagaatcaaaggtcctatcaggctggaaagctagccagtgctgcaaacctccaagagctgccataagctgtacctagctgacttttgcctgcagcagaatggttccctgacttccccatttaggttaccccaagtcatctgctctgaagtggggcagtttgccctcttggactggctcactcctgcggtgttggagggtcagccctaacaccagcttgggctcagctgagctcagcaccagcgcccagccccctcctcctcctccctcccattctgggttattcttagcaggaggtgacctcagagtgctccctctgagcaaaaataaccctggaggaagttggtgggtataaatcgtcaatgaataaatacgcatcgctagtaaataggggatggagccccacagggccactcaccccccagggccttgtgggcaaaggcagaaactctcccttcagggctccaaccggaaccacccatgaaggacaaaggcctctgcaggactgtctgggctggcaaccaggcaggaaccagcctcagacacccacacttgtcaccctgcaacatccttagaggctgccccttcctccccacctcacacccacacacgggctcagctccacgcaccagcccccgcctccctatcatgggcactggccagcccgcaggccctggcccaggtgccagctcccttcctaagccccgccctgccctgcagctgacttcctgtttcctgttgccggctctgactgcagcatcctggctctctggccagtgctgcagacaactaggccgttgccgattttaagcaggcgcacctctttgccctcagccccctgcagccttcggcacttacacacaggctccctggtatttgtgtcaataactctcttcagttccattttctttgtatgctttttggaccagttccacacactttttccagcagccctgaattcacatattaactgacagagaacccctgggtaggtacccagtagccaaactgcacggatgcagtgataaggaggaaagagcaccataggctttgcagttgggaggtgtgaagtccaagtcctgatcatcttctctgaacctcagtctcttcttctgaatgtggggataatgaaagcggtccccaactacctcacgcaggtttgtcagcatcaaataaggtaacccctgtaaaacgcctttgtaggcagtaacatgctgcataaccatgagcctttactgctggtctctgtcctcagtgaggcaggcaaactcagtgtggcacagctcagcgactatgcaatggcggtgcattttcaaactgtcagggatgaaagctcaagctttggttccagatttttaaattctcagtgcaccaagaaatgatacggttgtaaaatataaaatcacagcacgtggatgtggcaacattgtcacacacacataaaagcttctgaatagttatactcagttctgtaccgacaggtgacaacaaatgcttctcaaagtgaggtctgcagaccactgcagtcccatgtgtgtgatcggtgggcttggaacttgtctttatcagttcatttttattaactttggagacagttggagaagggaaaggccagtgtgggtcacagtggctgaactgggcttcattttcaggctaggttctaccgggctgtggtgctggggcaggcggagagaaggcaggctgtggaactgtgtaaggggcgggcaggaggaatggctggctagtgtgtttggggagcagtgagaaggtgaggtttctgtggccaaaggggtggcatcaggcatagcagggaaaggagtggtcagatggtgaggggctggaattcagatcttgtcccctaaaaaatggagtcccggggggttcctgaagaaggacgtgccggtgctacatttactgtgattatgtgtggcctcctctctccagcacacttgactgaaatagaaggcatcttcctctggtggcttcccgcacatggtcagtgctcaggaagtggaaagtgtttgtcgtgaagggagcacactggcctgggcatgcaaggggcaggtggagtctggtttgggtgagggcaatgccagggggcagaaggcacccagggacagatgcctgttgaaggccaagacagacagtccttgggggcaaaaggaggagagagcccaggatttcttgggcttgggggtgggacctggtgagggcactagtgggtatatctggaccctccctgtccagcgctggctgtggaagctcacagcctccagccagggtttcatctcttacttcccagtccccatccctgtcacacctgtcaggacctgagccaagctccttccccaggcttagctggatgacacactcagctgctttaaagctccctggcaaatctattcccagggccacagctgcaacaggtcctcagaagccatctctcctgtgctcctgcatgggaggggaagaggccaggaccagcacctgcgaccacaagggctgagccttggctgcagcaggaatcccccaacatgggctcccaggaagggccatgctggctgctgtcctcggggtcagtctttctcggttcctccaatgtgcaaggagttgctttcccaacagctgacttcccaatcagcttcacctttaccatgctcctcctcaccctgggcctctcctgagaggccaggcgacggcaggtgtaacctaggacttgggctagaacacatccagaccacgaggggcacgggatgcgccccgcctcccagggctgctgagaggctgatgctgggcccccaccccataggcctgcaccccagcctggtggacactgggccctgcagtggaacaggttttttacacagccagctctgcattgtttttttttttttttttttttgagacagagtctcgctctgttgcccaggctggagtgcagtggcacaatcttggctcactgcaaccttccccttccgggttcaagcgattctcttgcctcagcctcccgagtaactgggattacaggcacccgccatcatgcccggctaatttttgtatttttgtagagacaaggtttcaccatgttggccaggctggtctcaaactcctgacctcaggtgatccgcccaccttggcttcctaaattgctgggattacaggcatgagccactgcgcctggcccagcctgcacatttggactcttttgctgtttgccaagtgccccaggaggtggacagggcaggttttactggcagccatattttcccaatgaggaagcagcccagagaggttaggtgacttgctcaaggacacatgctgggaagcattaaatcaaggtgctgctcttctgtcaaactacggttgccgtggcctcctgaagaggaaaggtttggccaggcgggggcaggcccgacctttgctgaggctccttggtgcttgcaccatttcgttctcacaggggcaaggagaaatgcatccttttctcctctatttttagaaggggaacctgaggttcaggcagcagcagttcaaggttacacaggtggtcagtggtggagccagaatttgaactcaggtctcttggaccccaaagacagtgtttttccttctgccctggagcgtgcttcaggccaggggatgtaggactgccggcccctctcccctcactcggctgtgcccctcttctctgtcattgtctaggtgatgtccccacactcctgtccctgacttccttgtaccttttcacccgagtgcttcactccacctctcagcgatgtggctaccctctgattccagagactcacaaagatgagtcaaagggttgctgggtctttatttgctacaggtggtggctcttgtcctcagaaactggacggggacagggggagtttgcttagcatattgcacgttgccaagcctcaggagagaggcagggcacgctgcaaatgtggagtcaccagtgtgctctgactccggcctggctctcctcccacaccttctccattaaggtgccctgtgggcagaggagggtgcaggggccctgggaatctggagtctgctgccagccagaaagtcctctctgaagccccgtgttatttttcaacatcacgtgaatttttcattccagaatgaatttcattcattacatatccacgtttgctttaatattaaaaggtttaaaattacttaccagtaaaatgacttcactccgcccccctgccccccgcctcaaatcttcaggcagaactggcaggggtgcatctcagtacacagcaggttcccacaccccccacctccaggaactcaccaccccccccgcctctactgtcccatttcacttcagtcaccttcaacccggctctctacccaaagggagcaagtcctgggctccatgcctgctgagaacatttctttgaagggctgagtaacaaatccagagcctctgactcccccttaccttcttgctccaagtttaccattctcagctggaaggggggtaaaagaaaggaaccagctgtctctggtgctgggaaataatgactgctccacatctgagtttaagacataaaccagttaggctcctacagcccaggggtcttgttctccagagctgcccccaggcctcagcggcactggttcccagaagcctggcgctggggctggccctgcagcctacatgcctgcaggacttccttccccagggccctggttctcctgctgcctcacagagactcctcagcctgcatctcccccttcccatttgatcagactcccaggcctcagttcccttcctccaggtgggggctgagaccctgggtgagagtgtggtagggaggggccttcatagatagtccagggagatcttagtccagcctgggattctggcaggccctcttgcttcccttccagagggaggccaggagtcaggggcctggtccaagtcttaggcccaagaccaaccagccaagtcccctggcttctcagggcctccacttctctatgcagaaaacagggaaatgtggccgggcgcggtggctcatgcctgtaatcccagcactttgggaggctgaagtgggcggatcacttgaggtcaggagttcgacaccagcctggccaacatggcgaaatctcgcctctactaaaaatacaaaaattagccgggaatggtggcgcgtgcctgtaatcacagctacttgggaggctgaggtgggagaactgtttgaacccaggaggtggaggttgcagtaagccgagatcacgccactgcactccagcctgggcaacagagtgagactccgtctcagtaaaaaagtaaataaataaataagaaaacagggaaatgtgagggtgggatttgaagaatggggtacctgcagctggaggggtataccccatcacctggtcttaaatgtctccaggtccctgcaggacatacatcactgccatcgacaggccaggcacgtgtgtgttgtgtgtgtgcacaggagggtgtgtaggatgtgacactcaccggggggtgcttgcgcttcctcccaggccgccccaccttccgtgccgtggtgctgggctcttggcgctcctccttgccacgcggctcctcctgctcctctccgtcctgcaggcacagacacagcctgtgaggccagaggtggatcccagcagtgtagcattccaggcctgtctggggctggccctggcttcccttccagccccagcctcctcctgtcccacgagccacacttccagggctgtgtaatatgcccccaccaactcccctcctgcctgatgaggcttgaggcacccctcagagccccacttaaaatatatccttggccaggcaccgtggctcatgcctgtaatcccagcactttgagaagccaaggcaggaggatcccttgaggccaggagtttgagaccagcctgggcaacatagtgagactccatctctataaaaatacccacacccatatatatatctaaataatatattatttagatatctaaataatatattatttagatatctaaataatatattatttagatatatatttagatatatatttatatatctaaataatataatatatatatatatatatatatatatatatatatatatatatatatatatatatataaataatacatcctttggggaacttcagggcagacgctgctgtccccccggaaggcatctctctctctttatgaccacattttccgaaccataaaatcataacacaagctctgataaaggatttgagttaaaagtttatttatatgagaaagcttttgttcacagatacacaattacatttgtgatctacttaatgaatcacctttattgaaaataaaatcgctgggcatggtggctcacgcctatgatcctagcactttgggaggctgaggcaggtggatcatgaggtcaggagattgagaccatcctgctaacacgatgaaaccccatctctactaaaaatacaaaaaattagccgggcatggtggcacgcgcctgtagtctcagctactagggaagctgaggcaggagaattgcttgaacctgggaggcagaggttgcagtgagccaagatcacgccactgcactctagcctgggagacagagcgagactgtctcaaaaaaaaaaaaagaaaatcaagtgaaaagaaatattaaatttagcaatatctatttgaagtccaggcaatactcgaaatggacaactatggaaagtggaggacttgtacagctgtgaacacccctgccatgtggagctggcaccgcgcatgcctgtcagcctgcaggaggatctcagggaccgaatctcagctcctctccatctcttgcattcaccgagtttggaacagaagtttgttttactccccgcccctcacataacacctgtgcacggctgggccctgacatgcttgtctcctggggcacagagacataaacctagaaagtcctgcctcactactccagcctggccacaaaccacccacaagtcccttctgactcagctgggctctggcatgactaatccccagcagaaatgatgctggggaagtggggagaaagacgtcctgaccctgcagatgggccacaggctgctcttcataccctgcacgatgtcaggagccaaagatggcttttgggccctccccaaggaggggccaacccagggcagtgctggcagcacagaggtagaagagggtccacagctctcctggagacctgagtaagatggccctcaacaacctactcaactttcattttctgtgattgcaaaataccttgtggtttgccacattaatttttaggtgacagtgggacacacaaatggaaacctactgtgaccagctgtagacataagaccagcgggaagagcatccctggcccctccatccatcctccagctgaggcatgtctgcagggcagaccatcatggctcaagttctgggaggcctccaaagacatgcacatggagggtgaacagaggtgcccggtcttagcataggtggtggccacagtcaagctggagagaggcagagctcacacaggagatagagagagaatgctcggaggtgcagaagaggaccctggtgtgttgtgggagcaaggaaggggagggctgccaacactggagaccaaagctgtctgagaaagatactgaggatgaggaggcttggctaggggtcagaatggctgaccttcaagagcactgtcactaagctgtgcagagtgacacggcagtgagggctggagaaggaccaaagagggcaatttaaggagcacagcagaggaagcatctggaaaggatgccaggggactggggagccccgtgccgtctgtggagggagaggccagccccgaggccggagatccttcaggggctcttttcaggaaagcacagcagacgggcggtgagggcagaaaggctgtgggaggaggagcaaactcgcgggagccttcatgagggctcagggtgcccaagggcacacgccccatgggaggggaggcctgctgcttctgaaccatcttctgaagaccccagacccccgagtgtaagaaaggatcacacagagaggacgtattgccagtgcagcttagtatttgtgaaggttctgattggatctacacaactgctaagaatttcaggctgaggtggggcttctaatccgattcaaccagtgccaaatgggcaccgtcttgatcagcacttgtaaaatcattaggggtcatgtgaggtcatggaaaaagcaaagtgggcatgagcccagcttgtccatttcctagttacaggagcagcctctcggagcctcagtttcctcatccataaaatgggggtagggaggtgtccatcctgtctgcttctcaggttttgagaagacagcttcacaaagggtctgcccctttgtctgttttgtttactgctgaatccccagcgcctagggcagattctggaaaaactcctactgcccataaattctgggctttaaactatttctttaacaagctgcatttgtgacagagggagtcatttgactttcttttattctgaactaatcagagatgtgaaagccaaccagagcgtctgatcagtgaaagggaaccacagttaccacacagcaatgacctaaaaataaagacgcttgacatttcacgatgggcaccagcttccactgggcatgcggagaaagcctttgggggccccgacaggccacccctctgccatatgcagtcctgctggcatctctcacctacaccacgtgtgcagggcctgtaggtgctcggcacatttttttccctgttggattcaattccgtgcaacccagcccaggaggaaggggtggaccccccggtgccaggccacctctccaggtcctgacaggtccagagagggcggggagtgccaggcaggggtgctgtgtgtaccccacacctggtgcaaggagctttacggctggcccagcattcaggccccgcatgcttctgggtcgtgcttggagtctccacgagagccaggtctgaacaactcctggcccttccccttgacatttggccctaagagcagcgttgtgaaaagcatgttctcttctgccaactcttccgcgatggagtcttagggcaaagcgggaagcgatgcttctgctctgggcctgcctgaggttccctctgcggagggagggggctaacacgccaagaagggtgagcagatggcttgggccgtgcccctcaatggctccaaggaagcgtagcaagtggttcattctcgcatctgtcacggggtctgttttattccatatctttgctgatgggttgagcaaaggaatgtaaaacatgcttatcaaatctgcaagtagccctgaattaggaggcgttgctaatactctgaaagaaaagaatctgatccgtggtgacatgggacagctgaagaacagtaacacagttcgcgggaacagatttgagcccaggttggtttcctcatctgtcaagccaggggactgaattcgtccacacttccagcgcagaggggagggggtggaaattccagacacgtaggctttggagagggcagagccgggctgggagtttcgctctgctctttgcttaggagtaacctcaagctctttaacctccctgagtcttgctttcctcatctataaaatgggatgatatctacttcacagtgatgttataagaattaaatgaggtgatgtagcaaaagctgacacgtgatagtcactcgagaactgctaccttcccccgctccacacatcctgattcgtacttcactcccactccatcctccccatccccctctccctgcctcgtgcaaatcccagcacgccgcccaccatatgcagcgatccctcactatcacacagagcccaacatctggcgggcgctcttgccgcaagatatgtggcaatactggggctctaggagctttccaaaatgcaaagctgattatgccactctgcagagcttaaacctttgccacgggggttcccgggggccaggaggatccagccaagctcctcagctcatgtgcagggcggtccccaggatttggctggatcgccttggtctcttctccacactgtggtcccaacagacagcaccaagcgcgaaagcaaactgcttccggcctcagcccctaggcatagactgttcttctgaccacaccaccttcccctcaggtttatcagcaaactgttactcgcttttccagcctcctatcctggattccctgcccctaggccccctcctcccatcccctgcctagactgagctgaaagacccttcctctcctatagttcccctacccagcaaggcaacggtcagctccttgagggaagtgtgggtgtctgattcatgctggcatccagaatgcctagacggatgcatttagtccaaggcaggcacttgatgaatgactgtcacagagtaggtgcctgacgtgagtccatagacgcaaacagagacacacgtacaaatctacaaacccgtacaaatacaactgtgtacgaggttccagtgcctctcggatctttacgattccagattaggaaacaagaggactaaaacgtcccttctagacttaaacataattgtcactttgcatttatgtcattctttgcagctttcaaagcaccttcacatttggtggcctgtgagattaggtggttcctctctctaaacatctgaggctacgatctgacctacatttcaacactgctcactggatggattattttaagccatatacaacgtctcattctgatgcgctgggctatgacgataataatctctcacatttgcactgaacgtggtaattaacaaagcatcttcacatatgttatttcattgtattcttacactttacagaaagcagagctggtattatttttttctgttacacagatgaaacacctgaagctcagagagattatctgacttgcagggatcagagagccaggaaaggaggcctttagaaccaaaatttacatcttttgtttaccagtccatcggtctttctactgcaacatgccactataccctaccatgtcaacaggcacacacacagtgacaccataaagatacaggcaatccaaggtcaaggcacactggcattcacaggcacagacactctgggctggctgtgcccagacacaggacccctccccacaagagatttatgtctcttgaggccctcacctagagacagccagcctgacatacgtgtattcccttcagtacttaaaccggatgctactgacccagcatcggttgagcagatgtctcgagttggtgcttgagtcgaggggatgaacttgccggatctagccagctacttgcccgggccccctgggacaagaagcatgcccagcctttgccagctggctggctggcctcccagggactgtctgtggtcatggaattcagtgaaacgaattggcttctgcaagaggcagagccctgtcctgggttgcctgagcaccaggctctgcagagctacagccacacgcttgcgtaccccaatgccacacagacactcacatatgcttgcacacacacccgtgcccaggccaacctgcagaggctgatcccagcgtgaggggtcaggcagtgggctgggaatcactgtagatgcgcatgggcccagagccctccaaagccccctactttttctgatctcagtcacctcccaaggctcatcagccctttatttcaattattcaacaatatccgacaagtaaccattgactgcttaggtcgtgtcataattaccgaggaaagccttccatcctcctgaaaggccactctcctggaggggaggggccgtgtctcattggcgcctctgagtcccccacagctcctgggtacttgcacacagaggtgttccagaaatgctaaatagctgacaacggtggtgcccatctggttcccaggccctcgtgccagggctgcagccccttgtccacagcctgtccacctggctggggcctcattgtcttctggaggtgcagggtgggccagacctcacacccacgagcagcacacctcagccctgtccacctctgaggtctctatgtcacaaggccagacacaggggtgcactaaaaaaatctattgagcacctactgtgtactggatacaaagataaacaaataggaaactcggttcagagggagacaacaacatgtaaacaagtacctgatgccatgctgagcccagactggagtgtgctactgctctgcctgtggccacttccatggcaccaagcccacacatgtctgctccttcagtagcacacccagctctgccagcccttgcttaatagaggggaagatccagataaaactactttgtagccgtgtggcctctctaagccccagttcctcatcggtaaaatggggatgaggaacctctgaccatcatcctgctctgggcgccccctaactaatcatgatgacagaatgagtcaattaccgtgcagagaacactcctttacatgcccttccatgcagcacaaacattacgtgggatgattacaaggaatatccctaatgccctgtggctctctgcagaggcagctgcagggtatgaccaggactcctgtgccaagcccaggtaccagagaggaaaggctcatttcccaattatcctgggacactgctccaccactcagctctattctttttcttttttttttcccagccagggtttcaccatgttggccttgaactcctgacctcaggtgacctgcccacctcagcctcccgaagggctaggattacaggcatgagccaccacacaccgcagctttttttttttttttttttttttgagatggagttttgctcttgccacccaggctggagtgcaatggcgagatcttggctcactgcaacctccacctaccaggttcaagtaattctcccacctcagcttcccaagtagctgtgattacaggcacgcaccaccacgctgggctaatttttgtatttttagtagagacggggttttgccatgttggccaggctggtctccaactcctgacctcaagtgatccatctgccttggcctcccacagtgctgggattcaggtgtgagccactgcgcctggcccattcttctattctgcacagctgagcctggcctttcctgccctggccctgggcgactcaccttatcagcagggctgggctccatccctaacccggccattaagagcaggagggacccaagtgactgtggcccctcacctaggcccctgaagggatctacagcccctgccatcaggagttaggtctcatcaccacttgccttgttttacttttgttcaagggataaagggaactcaggcctttagtgactgatgacccaaagagagacaacattcccttcacgtgctaggctctcagtggactctaagcccacactctgtccccacccatggtttcctactcttctcccacgcccctgcaattcatggggcggcagtgggtgtaaaccacaaaggtgtaggtaggtaggtaggtaggcaggtaggtgggtgggtggatgggtaggtagatatccaaaataaattataaagctaacttaacatatgctatgtcctggtgttaaccacttgcacacaccatctcgtctgaacctctcaagccaactaggagctgttttcctgctcacagccatgtttccaagtcacgtgacagagtccagcttcaacacaggcccttctgcaggggccaaacaacccccatccaagactgtactgaccaagattaactacatttgacatgtaataatgtccaatttaagagaattttagagaaaccgaagcccaaaatgtaggtcctgctcagctcagggatgggcactgtttacatcacaaacctgctaagcacgcccaaccctctcctaactcccccgagatcagagtgagcgcgccattatcgctggctgggtctctgaagaggtgagggtgcagcggcttttctatagctatttaaacatactaagaaggatgctctttgaaatgaccttaccgcaaccactgtcaagcaaagagccagccctaagtgaccatgtgggggcatctgagtgcaagaaaggcagaacatgcccaggagcaggtgacagaccgcgggcagcaagaatgactgccactggaactggcagggaccccacccaaggatggaggcccttgtacttgcagaccagagtggagagagcccacgagaaatcagtggctgccaggcctctgggccagactttgatggggaggggaaaggaggaaccgcagccccaatgctgcccacagatgcatacacacacacacacacacacacacacacacacgcacgcacatgtgcaaacacataagtgctgtgtttccccagcacaaagatgcaccccagctgcagcttctactacaggcaggagaaggcttgatcagaggagctgcccagcaggcctcacccacccctggggggcaggcatggcttacccacctcgatgtcttcctacccctctactaggccctccaagcacggtcactcagttcatccaacagccttgcggagccctgctacatgctaactacctggaaaggtacctatgtctgaagaaagggagggaggaagagaagaaaagaggagctgtatgtccagggagggagaggcagggaaggaaggagggcaggaggcaggaagaaatggtaagaagctgcatgtctgcagcagtgcctccatctggtgtgtgtgcctgtacacgcaggtggtgtgtgcagttcttgctggagatgaagtgcccccaacttctccccaagggcaagagcgccattatgcagtgaaaggctttctcctgcagcaaaagtccaggggaggactacgaattctcatcacatcaccaccggggggcactgttcactccatcccccttcacgcaggagacagcctaaggagcgcagaagccagcctcattccagcctcagcactagcacttaacaagctgtgtgactctaggcaagtgacttaacctctctgagcttcagtttagcccttaataagatagaatgatgaaaataatagtgtctaccttatgcggcaattgtaagaattaaataagataggcccggcgtggtggctcacgcctgtaatcccagcactttgagaggccgaggcgggtggatcatgaggtcaggagatcgagaccatgctggctaacatggtgaaaccccgtctctactaaaaaaaaaaatacaaaaaattagctgggcatggcgggcgcctgtagtcccagctactcaggaggctgaggcaggagaatggcgtgaacccgggaggcagagcttgcagtgaaacaagatcacgccactgcactccagcctgggcaacagagcaagactccgtctcaaacaaaaaaagaatggaataagataatgcatgcacatagcacccggcagtcggcgttcaatgcatcttagccattgtgtttctgaggccagaggaaaggggacagaactgagaacaggggcctggcctggggctgtggactcccctctgattcatatttggggatctgaggtggcccttggactgttcttggtcccctgtcctgctccctctgccccccaccctctgctccatactcccctctaagctctcagcctccccactgcttgcctccccacccaccctccatgaggccagccccctccctctgctgcggcaacatttaccagctgactcgccctgaccacagccccagagctcggcctgcctcctccccatctccccaagcagccctgctctgcccaccatatggatggcgggtagggcaggcggcaggtgccagggggacacacacaggccactctgtacactcccagccacagcatggctgcctcagcccagcacccacagctctgcactccgcctccctgatcctgggctccgggattattctcctgtgggagggtcttggctactctcatttttctttccgttctatccgtaaaatatttcccaagcacccactctgtgctattccaggtccgggggattcacatggaagaaaagggccgtgaccctgcgctccaggctagcagtgggcagaagttatctacaccaatagttctcaacatctgtgcgcaacagtatcccctggagggatggttaaaggtgcccggctgggtcccatcccccgagttctggctcagcaggtctggaatggggcctgagctttgccttcccaggtgatgctgaagttgctcatttggggatcccactttgagaaccactggtcccctgcaaactataatacaaggccaactacagcctgggctttgaggctttgaccagggaggagaagagattagggaaagggcccatgcggcagagggagcagcataaacaaagacctggagactccaggaagtatgggagtggggctggagtgaaaggtgcatggaggcggggctgggggcgggggcggggagggggggcggcggtgggcagaggctagagggccacatggggccaggcagtggaagggccattggttggccacaccccttccatctggcttgccaaacagttcctttgtgcacagtgcccctggcacctgtgccaggctccctgggctgcagaccaagcctgtgtcttcccctctgcagctaccagcacccctgccgcaggcctggctttcatgggctgctgtggtggctgtcagtgtctctccccaccctccctgggcggctccctggaggtgctggagccagcccagaggtgccggggaagtgtgccaggtgagccagcatgcgtggtgtaggtgtgggcggctggggaggaggcctggctatggcccagcccttatctatccagatcactgccatcttttggcatgacccctcctgctggggtgtgagtgtgcactctatcagcaccgggatctagggctgggtgtgtgtttgttgccgcttgagccagagcagttactatgggtagataataatagcaatcgtaatccctcataattggaccagactttgctgtctgcaggtcacttccatgcccatgaccttatctgacttccacaaccaccctttaaaacaggcaaggctggagtcactatccccattttccagctgagcaaacacaagcccagatggcctgaagtcacatctccagtaagtggcatactcaggactaggacctgggatttctgactcctggtccagcgttgcttctcagtcctgagctattataatgcagatcctgacctgctcccgtccattggtggtggcctggggctccgcagcccagagcagcagcagcggcgtgggagtacagtccagtaacaggaggagtttgtcccagctgtccccaccctccccacctgtggggagcagctgaccagtgactgccagtgcattgatggggagctgcgtcagcaactgtcaggacatcggacccagagtggggcgacactcggggtcaccttatccgacagagaaagcaagccaggcccaagaaggggagggagtcagccatggccacagttgccactccagagcacagacagcggcaggtgtccccaactctacggccaaagggcttgggtcttcatgctgcttgagtcctgagcgggggcagcctaggggcccgcaggtatccaggactatcagttcttttcccatggattcagaagggaggagcctgatcggtcgccccgggcgtcctgcccagtgggccgcagcgcatgctggctttctgacctgctctggctgactgggtgcacacacccccacggtgctctacagggtgctgggctgggaaggcaggtccctgggcgtcatgtgcactcctgggatgtgtacatgtgtccctagcaggacctatgcaggtagggctgtgggaagggctcggacctgggagacaggagaacaggctgtcatctggacctgccactgcccagcggggctcagcttcctcatctgtaaactggggccatctgtccctgccccatttgtttcaagagttgtccccaaggaccaaatagaaccattgatggaaaactaggaaacagaaacacactctgaagaatggtaaacccaggaaggagctgagcacgcaagagggaggtctcagagctgacacccttcaggtagggtgctggctgcctctagccccagagtgcccagggcccccaaagctggtgccaggtgtccacctttgttccaaaagaaccaactggtgcccccatgagcatgcccagctactcccagacaccaccaagcagcacaacccccagcgctactcaggggaaggggagcaggcagggggaactgtggacagaggcacagcagacagacatgccaggaaggcctatggccatcataagatcccctggagggtggcagtgagttcaccattccactgacagagggcaacacagtccagtgctgggggttaaggggcagcttttcctatcatggggacacagcttggtaaggtcccaagacagcctgtggagacccagcagggactcccatcagtctgatgtaatctcctctgactgattcaggcacaacctggagttcagcagaagggtggagaggccacccccaactagattctgaaaacatggaggtcaccagctccgtggccaaaagccataccaaagataacccagcgacattcacctggagtctggggtggggggcggggacaggaaatcaccatctccaaagtgtgctggcgccacactgagcccagcctgtgcctccgtctgtgtgggagggtgggcccccgcggcctcgtgtctgccgtgccccaccccagaacttgtctttggtcccctagaagctactgaacaccttaaggaaacagaggcagctgagagagaaagtgattcacgtgaaggcccacggctagtaagaggcgggtccgagaaggaatccaggttctgggactctctgtgaggccgaaccctcacaatggcacagacctgggctttgagccactgtgcgaatgccatggtggttaaaagcctgggtcctggaaccaaatgcctgctccatcaccagaattgaacctctgcaagcctccgtttcctcatcacccaaacagggatgtgatggtcccacaccctgtcgtgagcactgagtgatgcggtcatgcactcagtatgaggagccggctgtcatcacatagggacagggctctccctctcccaggccagagggtccccagcagagcccgctgctcacctttcggtcctcctcccgctccgcagcagagctgctggtgtccccggggccgctggagggcatggcgggcatctgggcgccgggaggcaggctggggctgcgcggggctggggggctgctgggctttggggaaggaattatcgtggtctttggaggcgagagttaaaacttaaacatagatcccggtgttgagccctctggtgaacggtgcctctgtcagcctgtgggtgggggcttcgatggctccacctgtgggggagagaagaggatcagtggggcggagcaccccaccctccctgggtcaggccctcagcccagggccacacctggcctgtgaggcctggggtgttgctcctccttctggcctcaccagcaccccagagagcagagaaaccgaggcaggctcccttcagggccacctcctaccccagcagcctctgagagccttggagtggcagcagtctcccctccgtgtcgctgcggccaatgggtgccacttctgggacctccagctgcctccgcctcctcccttctcttcattcacagcctctctctcctttgaaagcttcccgcatcctccctcccaccccaaccagcccctgggaaatcccagcctcccccagaggcccctagcccagctacgttttccttctaatctgtcctcacccccacccccacacctcccgccacgtggaggaagtgagtgcagtcacaggatgtagtgaaatgaatgtcacctcacttcaggaccggtgcctgggcccagagaaagctgaggtctgagctcaggctgcaggcctggttggctctggcctaggagggagaggccacggccacggccaaggccacaggccacggccacactgaggcaggagtgaggctgctctctcccccaccccatgaaccagcctcatttgcctgcagagttggtgggcttgaggggtcctctgaacccacacggctgagtttaggggcttttcttccctctgctccaggtgtaggcctcaagccagagaaataacaaagcctgcagctcaggccacagctggggtgggggtgttgctgtctcagccccctcactcagagacacacaagagctcccctgctccccacccccggaggaggcggccgccaagcccctgccttgagtgtgccagggcccaggaggggattggcaggcaagggagagcgggaggcaggctggatctgggcccacccacacccttccccttccagttcctggttctgcttccccagctccccctccctcctgggcttctcctcccatccccctccagtcagggctccctggaaaaccaggaccgggagaaagcacaggcttggctctcctacaggcctagcccctttctccaggggtgcattcttgcctgggagtgggtgccccagccctggctgtgccccagggggtagtgggaggaaggagctggcaggaggagcttcttagggccaggacaggaagagctccatcaggtcaacccagaaaggcttgaagcggacctgccccacagctgagccctgaggcagcccaggtgcactgcgtccattccccatacccctaggcacagcgcagtgctgggcttaaggaaggtttgctgcccgggtcccgagagggtggacggcagcggagagcagctccatcggccacatgccactcagggcctggctcgtgctctgcatctgggcagctgctgtgccgtgcccagtttacaggtgacggtaagatcaacaaggccaggacccatcagaggcatgaacccagatctctctgacactaaagttctgaggggttgggttcacgtcccccaacacacaccacagaagcaactctgaagatcccaaaagagaactggtccaacccagaagcactcggctgccagcccttagcagccagtgattccctgtcaagcctcactccccatttgttaccacagacatctccagccacactaaaacaaaaaccttcgaaagggtcagaagctaagaggggcagagtctgattggaaagaacgttgagcccaaagtccgcaggggtgggatctactcctgacggaggcttccccggccctcagtttccccaccaatgaaatgggagagcaggaccccttctattaatagctctgaccggccaaggaagctgttgcggccccacaggcacagtggacacacaaggggctgacaaggacagggcaccccaaatggagtcgggggagacccaggcacaaaggaagcggggcgggagggttgtcttgatgctgccctaggcttagggacacccagagggcatctgtgccgccacgggtgtggcgaggttcagagaagctctggagaggaaggaagctggagggaaaagcagaacttcacagggcattggccccaagggcagacaccccagacaggaaaggaaaggaagattctcttcctcctccccttcctccacccaagactctgacatctgagctgcagaaactgtcctcacagaaaatgcagctgacctgggtcaaccctttcgtgttgctcaatggaccagccctgtcagtagcagtccctcaaaatcgtgtccatcacctaaaatcctccagtatgtgtctgggcgggccatgtactacacaaccctagggggccccagttggtggccaaggtcccagaccttgacatagcattgcccacctacccgtagacgcttcattcttccttcaggcagcccagccatggggagtgggctctcctgggcccacagtcccaacacagcagcgggtgtccaccacatcggtccttccaccgcacagccctggctgcttccgataccaaagcgttcttcccacctgggccaagggctgcacagccaccaccactgccaccaaaaaacccttgccaagaaccctaccaccatgaaaagcagcttttatttcctccttttagagtccacagtgaccatgaataatgtttgttaacagccacttaaaaaatttcaaggaatcccaccatgaaaacatcttcgtatcacagctgatatgatcaccatctccactgcgtcaactataaaactgttgtggaaaaagaactgaaagctttgaatatgcataccaaggctcactaccttctaaactcaatgcaatagaaacattttttgtttgtttgtttagagcaggttcttgctctgtcacccaggctggatgcagtggtagtatcatagctcaatgcagcctcaaactcctgggctcaagtgcaagtgatcctcccacctcatcctcctgagtaggtgggactacagccatgtaccaccacacctggctttttttttttttttttgtagaaacagggtctccctatgttgcccaggctggtcttgaacacatggcttcaaaggatcctcccacctcagcctcccaaagtgttgggattccaagcatgagccaccacacctggccaaaagattttttaagacataaaatcacaagattaggctgaacaagagaaggaataccaccaacaaaattgtggaatctggaaagcagacttgtgacagccaaatttcagacaggcgtgtgaacgctgatatataacacagtcttcaacagatgcttatatgacagcaccaggtactctggcactagggctgaagaggatgcttgtgtgagaaacgagaggctgagtgagagtagtgaattcctagaccctcttctacaagtttgaaggtttatctgtagtcactggagggcataaaatagggggtctttgcacagagtcacttggcacagctgaagacaaagatgatatatcaaaccaaggagaggaaggttatttatttatttattttctgagatggagtttcactcctgttgcccaggctggagtgcaatgccgcgatctcggctcaccgcaacctccgcctcgcgggttcaagcgattctcctgcctcagcctcccgagtagctgggattacaggcatgtaccaccaagcctggctaattttgtacttttagtagagatggggtttctccatgttggtcaggctggtctcgaactcccaatctcaggtgatctgcccacgtcagcctcccaaagtgctgggattacaggcatgagccaccgcgccggccgggaaggttattttaaatgctgatgtccagtctctcaggctattccccgattgggctctaagaatactggcagccagacaaccatttccttctctggagaatcgaatgagtctaagaggaaaggtttaaggatgccaataccaacatcagtaccaaaatggggtcaaaatgacttattcaggtcagcctatgtagacttgaaaaccaacaagtccactatcattctcagagcttccgatcagttgggtttttttgtttgtttttgttttctgagacggagtctttctctgttgcccaggctggagtgaagtggcatgatctccactcactgcaacctccgcctcctgggttcaagtgattctcatttctcagcctcccgagtagctgggaccacaggcgcccgtcaccactcccggctaattcttgtatttttagtagagacagctttcgccatgttggccaggctggtcttgaactcctgacctcaagtgatccacccaccttggcctcccaaagtgctggaattacaggtgtgagccaccgtgcccagccaaaattcttaaagaataaaccaaatcttaaacaatcttccaattagaattattttcagccaaattatcatttaagtgtgagagtaaaataaagacattttcttttttcttttctttttttttttttttttgagatggagtctcgctctgtcgcccaggctagagtgcagtggtgcaatctcggctcactgcaagctctgcctcaggggttcatgccattctccagcctcagcctcccaagtagccgggactacaggcgcccaccaccatgcctgactaattttttttctatttttagtagagacagggtttcaccgtgttagccaggatggtctcaatctcctgacctcgtgatctgcctgcctcggcctcccaaagtgttaggattacaggtgtgagccaccacgcctggcccttttcttttctttctttctttttttttttttttgagacggagtcttgctctgtcgcccaggctggagtacagtggtgggatctcggctcactgcaacctccacctcccgggttcatgccattctcctgcctcagcctcccaagtagctggtactacaggtgcccaccaccacacccggctaattttttgtatttctagtagagacggggtttcaccatgttagccaggatggtctcgagctcctgacctggtgatccgcccgccttagcctcccaaagtgctgggattacaggcatgagccaccacgcccggggtcttttttttttcttaaatagagatggggtctcactatgttgcccaggctgatcttgaactcctgggctcaagtgatcctcccacctcagcatcccaaagtgctgggattacaggcgtaagccaccgtgctgggccctagtaaagacatcttcagacatatgaggcctcacgctcctttcccaggaaggacaggaagatgtcctctaatacgcataagatccagtacaggagagatgggaagggaggctccaggatgaaggggaaaagaggccgcatgccagtcacctggcatgagccagagagggccagccttcccactgagactggggcacgagtgccgtcatcaccatgccctctgctgtcgaactgtctttttacctgacaaaactacacaggtatcgctcgtggccatactctgctatctaaacccaggaactgaatagattttttctttctttcttttttttttttttgagatggacccttgctctctagcccaggctggagtgcagtggcgcattctcggctcaccacaacctctgccttgtgggttcaagcaattctcttgcctcagcctcacgagtagctgggattacaggcacccgccgccatgcccggctaatttttgcatttttagtagagatgggattttgccatgttggccaggctggtctcaaactcctaacctcaggtgatccacccgcctcggcctcccaaagtcctgggattagaggcgtgagccactgtgcccagccatgaatggattttgatatggacagatgtgtgtcctggaagatgtgctctaatgaggggagtgagccaagcatgaggaggacacgaaagccagaaaacagagattccaaccggaaagtaatgggaattccaaagatgaccacaaaaggaagtcacagagcatcagctacaatgtgcctagaaagcaactagcccagagtgaaagaggatagataacttaaaaaatggaactgaaacatcttttacctgctgtgactgcccgtgtggaaagcaatactgatggctattggaaagtgtggtaggcccaccacaaagaagtgataaatgctggaggtgatggatataccaactatcctgttttgatcattacacaatgtatgcatgtattgaaacatcacattgtaccccatagagatgcacaattattatgtgtcagttaaaaagaaaaaaagaaaaagaagtcctaaggtaacagtattgttaaagaaaaataaaattatattagaagttgtggtaggaattagcaacaggtacaaaaaaataaggcagatgagaaacaaggtaattattaacttcagggaaaaaaaaacgaaaagaaactattacagtgcaccacaaggctcagctgtgaataatagttttatcgaaataataaaataaacactgtgtgtaggtttaacaaatatatgtgtgtgtacatatatatgtatatatgcatgtatgtacacacaaattacttttgtatgtaccacaaaattaatgccttaaaacaacacattatcggccgggcgcggtggctcacacctgtaatcccagcactttgggaggccgaggagggtggatcacctgaggtcggaagttcaagaccagcctgaccaacatggagaaactccgtctctactaaaaatacaaaaattagccaggcatgatggtgcattcctgtaatcccagctactcgggaaggctgaggcaggagaatcacttgaacctgggaggcggaggttgcggtgagcggagatggcaccattgtactccaccctgggcaacaaaagcgaaactccgtctcaaaaaaaaaaattatcttgcaattctgcaagtcagtagtaaaaaaaaaaaaagattctccttactaggctaaactcaagatgttggcagggctgcattcttttctggaaactctaaggagaatccatttccttgacattttcaacatctagaggctgccctcattccttgccacgtggtccccttccaactccaaagccagcgatggccagtctttttcccatcacagtactctctgcctcatcaacatctcctgctctgactactcttctgcttccatctttcacttctaatgacccttctgattacactgggcccacccagataatccaggataatcccctcatctctaggtcattaatttaatcacatctgcaaagtcccttttgccatgtaaggtgacatattcacaggtccaggggattaggacctggccatcttaggggggccattattctggctaccaaatgcacaaaacatttttgaggctggacacaatggctcatgcctgtaatcccagcactctgagaggccaagacaggaggatcacttgggaccagtctgatgacacagggagatcctgtctctacaaaaatttacaaaattagccgagtgtggtggcacatgcctgtagtcccagctactcgagaggctgatgtgggaggatcgctcgagcccaggaggtcgaggctgcagggagctgtgattgtgccaccacactccagcctgggcaaagatcgagatcctgtctcaaaacaatcaacaacaaacaattttttgaaaaaatataagaagagtactgtcaatatttaaggaggatggctgaagagcagaaaggttggacatgtaagaggatctactaaataggaaatcaatggaaaatgtctaaatagatgaatcaaaaatatgcactttactcagaaatatgagatgaaaattgctggaagaaacagccaagagaatcgaaagcggttgcctctgagaagaggataagggtaggagtaggcaaggaatcactgcattttgttaggaggttttagtactattcgacttcttaaattatatgcatgtactactgtgagtaaataaaaatgaatttttaaacagagagagtggggatgggagaaagggcttacgtcccaactgcagccatcggttgcgtttggcctccatttccttctctataaataagagtgtagctgaggcctttccacctctgttgttctatgaaatcatcacgtcccacagaataaccatcatcagctcctcacacccacacagagttccatcaccagctacaacactggtacctccctctccaccccccaccctcacgaaatgtttaatcctccaaacacatcattcccgctgcgtccagcccatgggcagcgcaagtcagtgctgcctgcatccgtaaccccaacccccgctcactcagccccttctcagaccaaagagctacatctccaccatctcctgaagcctcaggactgctcccctgcaccacactgtccccactgccgcccccacttcctcaccaaccccagcctcatcagcacccccgagatgaccacccaagcctcctctccatcttcagattgaggactgctggcccccctgccaccccacagtctctcctcaacaagggcttgcacataattatcctcttccaaaaccaaaactgtcacggcccacaaacctaaatcctcactccaccaaacacgatcccaatattctcaccctaagggccccttcttctccgtctcaagttctctgtctgaatggctgaaaaatatctgaccatttctgtagcaggtccttctccctccctctgcttgcattctccttttcctctagtggactctggttgttctgctctacctagatgccttcccctccttcccggtgggaaacgcttgtcaaaaggttttcgttgtgcctgtgctgacctcaaccctcaccccaggcaagtggtgagcacgtgaccaggcagagccaatcagaggcctccctggaacctttttatcgatgcgatggaaggatgctaacatggtcgatgtgagtcaggggctgccagctgctgtcttcccgccatgtgggtgagcctgcctgagaacgaagagctcagagatgaagacagagggataaagcgttgtagtcactgtctgggcccctggtcttgctgttcctggaggcagggacgtctctgaacttccggggactgtgagctttcactactttggtatgagtctatgacttgtggttgacaccctcctgacctaagggctaatctcagtcccctccagggctccctgggaggccaactgcggggtttccaacactggccttatttcttaccagctgtgtggcctgaggcgaaactgtgcctcagttttctcagctgtcgagtgggagaaagaactttccacctcacagcgctgctgtgaaaattaaaatggaatgccctaaaaatgcttccaagagcgcctggcacagagaaagtactcaataaatcttaacgatgattactctcagattcaaccagcccgcagatttctctcctttcttgaaatccctggagttcctctaagtggccttcgctcaggcaggagcttgtacttaagctcctccgacatgccaggccccgtgagcagagctttacaatgtcaacatctcattaatcctcacacctcaccccaaccctttgaagtgggtactatttttatccccattttccagatgagaataatgaggtatggagagattaataaaactgcccaaggtcacacagtgggtaaggggtggagccaggcacagtccaggtccaccccactcagaagctcacagctctccactccctctctcacaatcagcatgtgactgctgcagatctatattaactttgggcacggactggccagaaaacaaagtttccagtcagtctctctctcctggtcaggcttgtctgcagtgggagcggggaaggagggcactggagcatgctaatcacagtattcaatgccctgcccaatgcagtggtcattcactcattcattcatgcagctatttcctgagcacctaccatgtgccaagcactgtgctaaggaacatgcactatcctcaatcctcaaaacaatcctatgaagcaggtcctattgttatccccattttatagaagacatggaggcttaaagaggtttaatacctctctagggtagcacagctagaaagccccagggcaggattataaatccaggtccgtgtaactcagaacccttcgcaaatgtggcagttcttggtcatgaatgagcatgctaaacacacatctcagagccagcgccatgatcgatgtttgtgcctctggggtgaccctggcccacagataacagtcccatggctaaatttcctatttgagcttaggaggaggtgcaaatgtgggtgacagaaggcagcagagtatcttgtgccccacccccaccccctgcccaatcatctgctagggtaggggtcagctaggggccaggagaaagtggaggagacctcctagacggagatgtctatctgtcaactcttccccctcctgtcacaacctctcttggtcataagactggggatggataaggaggagggagagggaggggggtcttggtgccattttccagtgagatggccatcaccattccattgccctgactttcagaaacattacttgcacccaaactaccagctgtccatagaataccaaaagccactggtgacaggccagcagtcctgccctctgcaaagctgatttatctggctctagagtcacaataagacggcttgtggctctcacaccactctcgaggccatggcaccaccagcactggcaccaccagcactggcaccaccagcaggagcacttatgatcacaccaaacctgctgccactacggcggccacatgggagtctgagtcagactgctttgctcacactaatggttgccatgacacagccccaaaagtgagcgggggggggatttatacctaaaatagatgctgttaaggagctgaagttgttctcaggagccaaaatgagccaacacagacttccgtaaggcagcaccgatttccaagtgctgcaagccaggagaagccctgtctaggggtcacacgtgctgtgggtcagatgggcttcccacggcctgggagtcaggggcacagggtggcacagagtccatgtgagaatcagacacatggtcctggatggggtctggcagtgaccagcatgggtctgattttatcatccacagcggaagcggcccacggtcatctgcatgtttctctacttttccaaccttctctacagcatggtccacagctgccagctccagagcctctatcacttagtcccctgcgcgtggccctgtttccccaccccacaactctaaaaccttctggggatgctgacctcgtcctcgggggagagtgctcccaccagggacatattataatgctttccctgggagagaagacacacacacccacttggctttctcgaactccttacgccactgaactgacagtggaaaaaaggagttatgccactgtctggagtgattgatcctagttaccaaggagaaaactggattgctgatcagccacagagccaagcaagactgtgtctggaacccagcgaattctctcaggcacctcttaagaacgtccatgcccaaaggaaggctgaatggaaagttatggtaacaacaacaaaagcgggataactaaggattcaggtcctttgggaatgagggtttgggttactccaccaagtaaaagaagcatgacctgctaaggctctggctgagtgtggaggaaacacagaatgggataagaagacaatgaagccaggtagcaagtgtaaagtgtagccttgtgaacaaatgcagaaaccaggcctctagtggttttgcacattttctattaacttgatatatatgtgtgtgtgtgtgtgtgtgtgtgtgtgtgtgtgtgtgtgtgtggtgtgtttgcaatatggtaaccattttcttctttttttctccttcccattcttttctatacaagttgttgacagttagctttataatgtagtctttaggtaacagaatattcagtgagactgtgactgactttgagaagttattgtagccagggattggtagaatgatggttggggctctctgggcaaaagggtgagaatttcataagaaggataactatcttgataggtagacatccagttgtttgtttttgtatgggagttcagatgttgtagaaaggtgcaaatggaagctgtgcagccaaaggggtaaactgtgccagttatcagtttattcgcccatcattgcctgtgctgtgaagatggagctgggccctttaactacttttcctttgtcagctggcacaactgtggagggcactgaagaggcattgaaggaggaggtgggtttcctttctagacccagtgtgctcttgttgggttcctgcattgtatacaacttctctagcagccagatcttgctgcatgggcgcttcccagcatcagggtcttgccagatatgaagcttcccagcacccagctcctgtgctgctgcagcttctccagcatgcagctttccagtgcccagctcctgcaggagtgccaggctgttgcaatgcagacagcttctccagcacctggctccagcaacacgtcagtcaggagtacccaacagccaggagcttctcccagcactcccctgggaaaacgtagcagcggtgtgcttccagcaagatacctcccacaaacaactttccttgggacccaaaaagatggatttccagtaaattccagagggtggatttccagcaagttctgccaacatggcattacagagacgttgccatccagggagccatcgccacaccctctccatcaaggtgtggatctcaaccctgcggggcctcttccttgggcactctgtggcaaccctagaggtaggggctgttctcatatctattatttttgtattctttggagttatttttacttcttactagccaattcctcattattccaatccaattagagttaataattcgttatgtgaaactttccttgttccaatcaccatgtggtttctgtcttctgaatggaccctgactgatacagtcacccgcggccccaaagggcttttttccatcctcatggcccttgagctcaattcaacatcctggccagctaatcactccctgcttcaagcactcactcaacagccatttcttgagtgccattgtggagccgggccctggagtgaaaggagacccctgcttctggagctcaccagcaactgccttctgtgtgttctctcccagccatgactccatctggctccttgcttctgggtctccagcctcagattctgcagctttgtctctggggctgtccgggagtcttgatcccacttctgcacggtgggtgctcctcaaaggtcatgttctaccttcagcttctctctaaatgctcttcctctaagacacctgggcataagttaacatacgcctcctactgccaggggctccagctctatttattttcatcccaactggatgacttgcagtccctaaaatcctactcttccagaacatgcttctttcagagccggctctattttctggtttttccctctatgtggaagtaacattcccctcccttcagctgcctaagtcccaaaccctggagaaaactcaggtcccacctttcccctgggtcctcacatccagcaggtacctggtccttgggcttctctcgtccccctattccctccaggccctttgtacctcttgtgtctgtggcacaataacctggtagatgccctggagcgggtccacctgcctctggcatctctacctcccaccccaccctatcagcaaggattgcccacacatggctccctctatgaaaacctatgacacctcatgacaattttaaaaagttgattgtgaatgtactaaaaccatcgaactgtacacttatatgggtgaactgtatggaatgtgaattatatcttaaagctattatttttaaaaatccggtgatgccaaagatttgcacacgtggtaaaatatacgctctggcctggtctcaccagggctggctacaacgcagcctccgcccactgctctggccgtgcccccacctctcccagctgcatcattccaggcccggctgctgtcccggaatgacacccctggctcccaccctctcccacagggcccactcagctcctctctcccagtccttcaacccaacatctctcctcccccaaaacaccgtccccttctcctcgaccacccacccaggggtcattgagtgttccatgcgtatatagatgtgtctgatttctcaaagagacgaggtcagagttcatgcgttgtatcttgctgcccgtcccccccgcccacagcttgtcccccgcaaccccgttccgggtgaccctggaggcagagaggactgtgtgaagtcactcccaggcagctgcaacatccccagcacagtgctgcggtgcctagagcgaccccccacaatccccattctaggggtcgcttggcagagcccccaaggcactgcgtcagtggaaaggctgtttgcaggagctccgagggcagaacatacacctgctgtgggtctgcaggctcacctgccccagatccccaaggtgaaggggttggtgagggcctaggctatcagtgaaccacaggaatcaggggggctgagtccttgtctggcctgtgaccaccctctccccacaccgtccatggccacagtcccccaaccccacttcctaaaccagctccctcttgggtcaaaaccaggaggtcccccaaagggtcttcagggcttgggagcggctgttggagctcgtcccccaccaccccaaccaattcagcaggaagggagctcgctgctctcagatttcccacagggccgcctttctcctcatcgtctgtcccaacaaaaacaaaccatttgtggagggggccgagggagggagaagagcccagggttctgagcagcacatctcagaaccatgggccctgcctccagcagtccctgcctcaaaccctggctctgtcactgagagattcgggcctcagtttcccaagttgtaaagcggggtgagaaagagtccctatttcataagtctattttaagataggagggaatctgagtcaagtgtttaacatagggcctggcacgtggcaggtactcaataaatgatcatttaaaaattattatgtgcttgatcagaaagaaaggcaagccatatgttcttaggaaacctagactctggcttcagaccacacttcagagtggcttgtgctcactcctaggaacggctgctgtgccaggctccccctcccagctgatgcccctaagtctccagcccaggccccgtgccactagaatggggaatgtatttaccagagaatgtctacctgccactgtggcctcaggagtctctcacagtcatgcagaccccacacacacacacacacacacacacacacacacacacacagacacacagatacaaacacacatagatgcacacacagagatatacctagacaaatgcagagatgacccaggcgcacaggttcacacacgcacacagcccccctcatgctgcacacgctggggcacctggagccagaggatgctgggcgggccttccgacacaggcacacgcgttgcacatttcacctactgtatgggccaaagaggcatttggaaaccagcttgggaacctcataaccattcataacattgttctgagagaaaacacaaaacattgccctataaacaaacatttgcaatagaattcctccaaaagcttggaaatgcctgtactagaaaactaacagagcaagaagagaaaaaccacataaacttggtttgcctctgcaaaattaataccaattacaaaaacatttatgtgaactgcttaccatttacacctaattaccatgcagcacaattatgcatatcattaagggtatgccagattaattatgctgtacatttcatttgattacaacgccacaccctgagttcatgtatgccccacttccagggggccagtcctgcagcatggctgcttgcacaggtctgcacaaaccagagaaacgtggatttccacactcggatggaccgcagcccccaccccacccccagccagagacagcccgactcccacccggccttcttggcagcatcaacaagagccccgctgcgaagccatcttcccagcagatcctccagaatgcagagatgcttcaaaggtctccccaggggtgtggctgcatgtcacaaggccaccatacagcccaagggccatcatgtacggccctcacagaggaagcggccctctctgccatctcctgaggtctggctcggaaagcagggcagcctagcccatgtccaggccaagtccttcccaagctcatctcccagacccaccagggctctgtgcccctatcccctggcacactgagccagctacagggcaaggtcccagctgtggtcccactgggtcctgcaacatcccccctgtcccccatgccctctgctctcccggacagctctgcacagaccctccctccccttattaaaaagaaaacaggaactgacccccaataactcccatttagctcagtagatgctcttcaaatacactgggtgaaccaggtttgcagggaataattgggaacaagagagtcaatagaacatgacgaatggaccttcccaggaagggggaactcaaaacttggagttttggagggaacaggaggaaacaggcttcttgggaggcaaagaaccagaggaagtgcagaagcgagggagggaaggaaaaaatatccaggtttagtccaagaagcaatgctcaaaacaaacaacaccagcctgtgaagttatgtccattttacagatggtaaaactgagcctaagaaaggttgagtgatcttccaatgacacgcagcaaggaggtggcaggggtgaggtgaaaccatcatctgtccagtccccagcctggtggccccagcacgatgccacactgctcctggcctctatctaaattcaatgatgctgacatggctcacgtcattttttgagaaattctttggaaatagccttccacattatccttcacataacacacataagcctcctttctattttagaggaacagtttttgcttcttttctgtttgctttccaaaaatgctgtccccagcttgtccctcctatctctctccgcagacctgcctctgaatggagagtgacggaaaggctggacagcttgacatcaacttccagcccacccaaagattctcagacggtgatgatgctcgccgcaggtcctgggtggagggccagggtctaggccttgcagctcatcttttggggaaatcactgtgaagtagaggcgctaactcatcagcattcccaatgcaagggtgcgagcaccttcctcaaaatcttccttcaaacatctgcaggggtcgtaccagttacagactgaaatgcacctgcctttctcatccatcgcacaaggcaccccgcctccaggccttatgactcaggctccagcctccttctgcaagcctggcctggctcagcctccccctggggaaatcccacccgccctcaagccccagctacaacccagctccatgtgggaggcacctcctgctctctccgactccccccaacccatgccccctccatgaagggcatccccacccacacagttggctgagctagaaaccagacagccaccccaactcccctcattgcttttatcccgcctgttcctactgactgcacttcctaaatgtcacaccacgcacaccctgtccaggcccacattgctgccccggacttctgtgccagccttccacccgggctccctgcccctaaaccctattgcccgagctctcgtcctcgatgccctagaatgatccttctcaaatataaatcccaagcccaacgtccgttcataacatcccgccttccatgtcccccggcccaggcccctggcttcgtatcccatcgttccctacactgcagccacatggggccagaaagtgccgtcgtccacctagctaactgctccctccgcttcgagactcagctcaagcgtcacctcctttagaaagcccttccagatcttctctccccctgaatccgacttccttctctgagccctggtaatccctggacatggtgtgccaggggtccttccgccctgccagaccccacctaagctgcagggtcattgagatgagtgtgacccccttcatctatgcagcctgtgtctggcacacagtaggtctcttagatgaatggatgaacatcatttgtggatctgaggcagggacctctggaaagaaaactcaagtgctgccaggcctgccaactcgggggccagcatctcgccatgccgtgccctggctccctctgattccaggctgctggcagggtgttgacagaagaaaacgcagaggtgactgactgcccagccccactgggcttcccagctgagcttccagtaccaggcagggccctcaggccaccaccagttgggctgggaaccaccagcctgtgcgtggatggcaacaagcaccacattgttgctggtaataaaaccattaggagcccttgctgcgtgccagctgccaggccgggctgtggtctagaccctcccctgcctccaggccgtggggcagagccagaacccagcaaaggccactctccgcttagctccaaagagaccagtgggcagggagggaaagagggcccaggccttgagcaggctactgggtccccacatggacaggggactctgaagagatcaaaaaaggtacaggcaaatcctggcttcacaggaagaagtggaggtgcagaaaggctaagagaaaaagggacaacttattggcagctggaaaaagggacctgggtcagataacggaagctaaggaggacagagacatctttctctatccctgccactcccctgtggcccctgactcccagcccagagtccaccatgggcttgggggtcattctcaacttgattatctcttcccctcaccgtgaggggccatggggaggacaggccacacttgcaggtcttttttttttttttcttttgagacgaagtctcactctgtcgcccaggctggagtgcagtggcgcgatctcggctcactgcaacctccacctcccgggttcaagtgattctcctgcctcagcctccggagtagctgggattacaggcgtgcaccatcacacccagctaaatttttgtatttttagtagagaggtggtttcaccatgttggccaggctggtctcgaactcctcacctcagatgatccacccgcctcggcctcccaaagcgctgggattacaggcgtgagccactgcacctggccacttgcagggtcttacagagcagcagggccttacagagcagcagggctttgtgggggtcaccctaaccaggcagccctggaacaacccccacgtaaagaaaagcagctcatgcctcctgagcaccttctctgtgccaggcatagtgctagctgtttcacaaaatattgcacgtcattcaggcaacccctgtaagatgagactgctattcttatccccgatttacagatgaaaaacctgcagctccaggtggtttggggccagcagcaactgagcacaaatggggctgagacagtcctccaggtcggcctgactcccgaacgccttttttgccctgcacatctgtcccctaccagccttggattaaacagctggtttgtagaggggccagttctgtgcttgcctccaagtcataggtccttttatgtctgttcctgccttattccaggggcagggtcaaaaaagtgcacagacccttcccatgtcctattgaacaggggcagcctcgggggaagggaagccccaagaggcacccatgggtggggtgcgggagggtaaggtggaagagggtggtaagtgctgttgctaagcaaccagccctgagcttcctggggtagcaagacgactgcagacagaggaacttgtatttgcccccacctcacctctccaccccatcatctgggtgatcaccacctgctcagggacccctagatcagagttgaacccacgtgccaagcaagttcctagacaccccttctaccccttcgtggggcctcctgaagccccactttgtctcccttgggtgtggcctcccaagaggctctcactatgccagggctgggtcacctgagctccatacccgggccgggccccagttatacctccagttccccaggaaccatttgggccacaacagcccatcagactgatgcttttgggggaagatcctcagtgatttgttctccactttgggtcagaaatgagtttcaagtcgccatcctataaagctaactttgtcccctgtccctggcgtgggccagggtgcatgcagtcagcggcctattttctgctctcacctaatccctaccagcctaggcctttgctcagaggccttaatatctgcgatatttctccctgcaacctttccggaaaagacacgtacctgagtaagcttaccccttgctgtcagtctctaaaccagtttcttatccattataaaaaagagtccatccctcagccttaggtgacttaattcttttttctactttctcatccacaggcttttaaaaagtgtagttttatttttgttgttgtcattaagaaagtaactcaagttcatttacattttttcaaagaaaacgaaagtgtacaaagttaaaaagcaaaaacttgttgacaggtttgtgtgtatctttccagaacaacttttccatgcatgtgcaaacctaaacatgtgtatatttgtatcgattttaaagaatttcacaaaactgagattacactatgaactttttttttttaaccacaacactactgcatggggatctaacacatcagaacagactcgcctaccaccttgtttcaaaggcttttagggaatctaagtggattcccctttacccatgcatttatttatcacttcgggaacctatacaagtaatcgtgcaggccttccagaagcctctttccaaacaggttctgctcactggggtgctggggaatcccactggcttggcaggggcaggggcgaactcgcctgtgtctcccggggtcctccagggagtggcgggggagggacactccgaaggcctcctgcccccagaccatggccgttcccaagtattccccaggacacagcccacactcaacagcttagtgagatgcaaatctaacccacaccccataatctctaagcatctttttaccttttcaaggaaggatcactggaacccatgacccagctgatctatcagatctcgaacatctgcactgagcccccctcccctttcattatagtaagaagagcattagactaggagtcaggagacccaagttccagctctccggttactggctataagagatggtcctccgtcccctctgtgcactcagacggggcagctaataactggctcagaattaaaaatgaccttgacatttgaaacagaagcagagaggaaagatcaatagggatggtggtgagcagggccgtgaccacaggaaagagaaaataggaacctggtcatatatctaaataaggctgggcagcctttaagggtcagagaggaccacagtaggacaggagtaggcaacatagagctgctgctgaaaaaaaaaaacaaaccactccatactgggatttagctaggaaagccccaggcgtctgcacctcccttacccccacctccactgcccaccaagcacccttgctgtcctccagacaggttggtggcctgtgatgtgatcagcaagggagatttggcccagaaggccctgcccaccagctgttcttgcagggggctgccaggcacctgcactcatgcctgggggcctgggccgtctgcagggcacctcccctctgggttggtggctcggttctgcccagcgtgtgtgttgggggacagggtcaggctgcagagacaggaacctgacgtcttcacccccatttccctggcactggcagccccttgcaggaatgttctggatgctggggcgcctcagcctgatggagtgggcaaggggggacatggagacctctgggaggccagaaaagggacccttctccacctgccacatcctcaaccatgactgctatcactcgctcgcagaccagacctgaccctggcctcccccttaatcgtcacaaccccctggggtcagtgtaatttaaaccctgttctgttgctctccaagtctgagctcttaagctctggtctatggaatagaaagaatcaggatccgacaccaaatgagctcatttggccccttcccctccctccctgctgtcctctctccacccctacccccactggccgccacgctgaggcagttcagagcgatcctccgtgggccacagaggagttccggagtgcagggatctcctccccaaaccaaggcagggcctcagcctggcctccagcacaacccaggccccagtccacctcccgggcactacagccacccacaatgatgtcctgcccctgaagccccacttctgtgctctggggcgcttctgagatgccacctccttcaagaagccttccctgatgaccttagttggttgtgacctcactctcctttgagcactttatttctccctctccagtgaccccagtcccactctgcagttcttcgttagctgggcgcatcctaaacacaccgtgtcccctcaaagccagcacagggcatggcttacaggaaatgctcagcacatctctggaaaatggaagcgaatacggtgggaaagtgctgctgcactcaagacaggatgagaataacgagctgaaactacagcgggagggatttcaggtggaagcaaaacaacctgttgacacgagatttgttcaactcaacagattgctaagtgtcgctgagaagcctcccacctcccaggatttttaatcagaatcggcactttcctcatctgaccaagattctgcaaaagacacaggaaggtggacgaggcttcttagagcacttcctgcagtgctagtccacgtgagccacccaaatgatgaaaacagacacagctaacaggagggctcccgctcctctaaggctgtaacgcacatgatctcactccatcctcacaaccacctgtaagcagaatccacgcacactcccatgttacaggtgaggaaactgaggcccagggaatcgagttgttgcccaagttcctgccgctgggaggtgtcagagtgcagctccctgtgactcgagggcctcaagctgccttgacactggctcatgtggaagcaagtcctacccatccacaggtggcggcacaccacgtacacacacatcatgcacagacacatgtgcactgaacctcgtcttgcccacacacttagccaagtggaggcaggctcggatacagacataaatctcaggctgacacttcatggatctcagatttggtcatgttcttagggaaaaatcgtcagagagaaatgattgaaaatgagccctcaaaattaaagtggaaagggatctggcacctttagtagaccattaaagccctgctcaggaacagcaaagtccctgcagaaacccagcctcaggccaggtgggcttctgacgggctctctgctcacatactaatattcaaacaaaagtagaagctattccccgagggccgcagcatggggaatggcattggggtagatgctctggccctacctgctggaggccagagacacactcaactcccagtggggcacggggtggggaggatacgagcaccaagtccaggaccccaggccagcaagttggaggcagcaggaagtaccctgggagaggcatgtgactggcacgtgaatggccctccaggcctcaggctctgggtagcatggacaaccctgggaagaactgggcaccacctcccacaaacagtcccgtacccagcactaagagctctcagagcttaaactcctctttcagactgcaattctaaggtttgggttctaatgctgacatttcgggcccaaagatggggagagggtggtctgttttaactcacccattagagtcctctttctacctggatcccaaaaagagaagccttgggggagtctggctcttgctgggaaagaacttgggtctttcagggaggtgtgaccctgaggagctggcctgtaagtaggcagtggccgctgggcagcggcgcacagcagcagggggaagggagcccagcactaacctgcctcgctgcctcggggagaggactggagggcagtgcgctcccctcgctcagcagacaccctcggaggcctcaccgcttgtccaatggggacccagggaggcaaggcccctgtttcctggagatcacaaactgagagcggggacagacacatgcagcagcccaggtaagaggtatagcatggggcatcttcccccgagtgcaggcctggctccacttcttcctgccggtgaccctggacaaggattttaccgtttgtcctgtcttcctagctttttgagaaccactggcagaggtgggtgtgaaagcgatagtaaaacatccataagggactgaggagcttactgtgaattggacttgaaaaggaaacctcagaaattatccacacacagggatttatacacaaacctacaggatacacacgtgccgaggcttaaaggaggctgtactttttacaccctctgcagagtcggacgtgaccaacccgtctcttgcagggaccctcctcacactgcctctccttcccaaggcccaactcgctgggcgccctgatctctctcatatctccttctccttggaagccttcccctattactgccatgtgccgaaaaacagaccaccctgtccccattgctaggcctgaaattccaccactagaatcagagccatagaatgtcaaagctggaatggaccttccggctctagtccaacccccaccccacagaggaatcctgtccgcagacaccctgacagatggctgctggcgtcctttcctaggcttctccaggaaggactcagagggcagccctgtggaccagtccactccttgagtctagaaggaattcacctttcttagggtcagtctcctatggaaggcactggtgcctgggtggggtaacgagggaagtttggtcggcctgaatccgcagctgcttatctggggaggagctgcacagaggagggggacccaccagggaggcaggcaggtgccagagctgctgcacaggccagcctggtccctcgcctggagccagcacatgtgcacacacagactcccaccttgacagagccacctgtcacagcccaagcagggcctcggtagaacctggaggcagagggggaccattttgccccagaaacccagcaggaactccctacaacccaactctccaaaggcaggcagctcagaaaactacctggagatggcccctgctagccaaccaaagagggtccccgggatgcctggccccccaaatcccacaggccagtcctaacacccaggcaatagcaaggcgaatagctcccctggctgcagctgtcacatctgcccgcgagggaggaggcgacactggagcagcacctgatcccaggatcccttcgtagccgcccgcccaggaggcgggttcagccgctggcagcctagggtgaaacatgaagactgagcaggccctcagggatgctgatggcagtctctgggcacggcagtgaggggcaagttgggtcacagggcggacagcgcttctccccaaggcttctgtccccgctggtttggagggggggtagctgcgcggccctggggctcggccctgcccaccctcccgcctgccgcaggccagagctgccctgctgggtgccagacgccatgttgggtcaaggtgcagccgcagggggctcccctcaggagccgggggaggcagcccctgggaaccagagggcactgctccccgcccagggcgccaacacctcctcaactggccgtgcagcggagagagggtgccaggacggaggggatgaggagagggggagaaatggcagaggggcgctggggtgggagagggtgcccccaagaagggaggcttcaggaaagcgaaaagcagtttggcagccccagggccgcgggccccagcgatgaggggctgggggaggccaggggcgggccctggacccgcgccagcccggtccgcgccgaaggggagggaaggcagggcggcctgggggaggggaactggggtgagggcgggacacggacagccgccgcctgcggctccgaagctcgaggtctcccggggtgcggggacgtggggccgaagaccccgctccgcagccgcggcgaggcctcgtccttcactgtgcagatgcgaagctttcaaggacacgtctgcaccggcccggcggggtgcgtgtgcgtgagtgtgtccgcgtgcgtgggagtgtgcgcgggggtgctggaggggcgaccccgggcgtaccccccctgcgccgctcccggtcccggccccgctacttccacccccgcgttttccggcccccgcggcccgggcccgggcccgggatcctcgcccgcccccgccccgcccccacattgcggcgccgccaccgcggccgcccgggcacccacggcccgcggtggggacagggaggagccgggcacgaccacccctctccgtgccgccggcactccgggggaaggtgtgcccccaaggcgggcgctctccccggccccgccgcccctcccggccccgccggcgccccgcacccccagccacaggtggccggaggaggatcgcggcgcggcgctccccggcccggccccgccatcacccctcggcccgcccccgggggcctcccgggtcccccgccccgcggggccgaggagggccgggcgccggggggaggggcggggggccgggtcgtgccaggctgccattttctgccgccgccgcggagcctgcgcggggcccggcccccgccccctcccccgctcccccgggccgccgcgggggccgatccttctgggtcggggtccgcgccctccggcgccctggccgcgggctccaggcggggccgcggggctggggcagagcccggaaggcgggggcggcccggccggggcccctgcggcagcggcgagccgggcaccgcggcgcaggccggcggtggaggggccccccgcggcattgtatagacttgaacttgagcccggagccgggcgggggcggggaggggggtccgcgccgggagcgggcgggacgggagggggcgcctgccgagcccgcggggacataaacaaaccctcaaatcccccgcgccgccccggccagcccggcccgccgtccccgcctgcagtcccggccccacgggcgcccggcgccgagttgcaggggtccgggagcgtgccccgagccgggcactgccagccgcggcgccccccgcccggctccccggctccccgccgcctccgggccggccttccgggccgccagcagcggcgctcattaccgtatggccggtggggtcgggccggcccggctgcgcgccctggtgccgcggcgccgcgtcccggctcgtcctctgctctcgccgccgccgccgcccgcgcgccctccctccctcccggcccgcctgcctgcctcgctcgctcgctccctccctccgctcgctgtcgcgctccctctctccgcctcctccgccgggtccccccctcccaccccttctctccgccttcctccttccctccctccggccgcccgcgggcccaggcctccgcccgccgctcgccccccgcggccgcgctggccccggccccggcgctgcggagccggcccgggaggcagcgccgactggggggccccggggcgccgcggcgggagcggcctgggcgcgcggccggtcctagcgccctcggcgcgacttcccggcctctgcggccccgccggggtccccgcacgccgcttggcggaggtctggaccccgcaccgcccagaccgggggccgggccccgggcgccccgcctcggccgcgctcccggccactcagagcccctcgagtcgtagccgagctccgggcctcgccgcagccctccccacgctgggcgccccgctacctggcgctgcttctgcgctgggtccccgcatccagcactggccgcagggacagcggcccctcctctccccgggccggtgtcaagtgcctccccccgcagcccgcggagcccccggcggccttcgccctgcagttctcccgacctccgccagagcccactgcgctctgcctgcctcagcactggggctggggacagcagcgctggcccaaccgcgccgcaacccccagccaggtgccgccgcggagtagaggccactctgctctacagggccaaggtcggagcgccaggctcctcctggccgtcccgcaggctccaaagcctctctgagatgagctgccttgaagggagtgagttccccgtaccttgaggtgtccaagtagagttgggtgtcctcagttgggcactggaagactgaaagatttcatgaggtgggaggttgaatgaaatgacattgaaggtctcttccagctggaagattctgtgtgtgcctacacaccgccctcaccccttcaccgtgggggctgttctccttccccatggagcgctcagggctctaggttcctgacttggggcacctctgtctaattccaccagcacagccactcactatgtgctcatctcactcctccagcagccgctgtaggacttggggctgggcacccccccacccccgcctccagcctccttgcgcgccccagcaccccaccagccacccgcagctctgcaccccgaattctactcagcacttcagctatatcacagtgccctgagctccctgactggcacaggacatggcgtgctcccttcccagggacccgccatcctacttgtgggcagggattgctggagttggtggtgggactcacttcacagtgaagcggatcctacttttcccttctccccatgcagcccagcacccgcccccccaacgccacccttttagcgtcacagaaccgagttgccaagttctctgggaccgggagctgacctttcatacagacgggaaggttttccttcgggaggttctccaatgcttccaggtccctccgtctccccaacccccaccctgagcctcgatatctgagaccagcttctaggccatagttctggccgttttcagtgtcaccctcactcaagtggccaccccgccctactgatgataggccctgctgtccatggtccccaccggcccagagactcccagtgctctgtgaggacaggggccgcgtctgtcatccctgtagcccagcacttggtgctaggagattctcagtaaaccttggtggaattaacatgtgaccctcctgggctgttcgctttctacatcaggaggggcatccgtgaacactctaaatggcgcacccagcttggcaaaggagaagaccgtttatagaaggatgactgagatacctctgccttcatcaagggcttacatataacacggccccaaacagcagcgactgtttactgagtgtctactatgtgccaggcaccagacatggtattttctctagtcttcactagccctgtgatatggcttgtactctcctcacgctacagatgaagaaactgaggctcagtcttagtcaaagccatacagttgggaagtggcagagtcaggattcaaagccaggttcatccggctctgaaatcaccccaca

SEQ ID NO: 167 - DNA, 339920 bp, Homo sapiens
  source 1..339920: mol_type = genomic DNA
tcctgttgccttgtgttaaggcatcttggaactgttagcattgactgtattttccttttaccttcagatacctgggcagggcagcactgtgtcttctatgtagcttgtatgtagttgctaagtatttaatcattcccacagatgatagctaattggcgtcttttaaataacttcttcccttggaataatgtaagtggaatcatgagaggcttgccagctcagtatgatttttgtatagcttgtttaaacctcatttataaaagctgacaaatgtaaaactgggatttattttcatctttgtaatcaaacagtaagttgaagctaacttcaatagttaaactgtcttaatgaatttggaaatgaactagctctgcaccaaatactttgatgttaagtattgtacaatttcaggaagcattgtccttggaattgtgggacatggcctgactgtaagctctcagagaaccacagatttcccaggataggtttagaaaagcttatattagcatggaattatttagcaaaggttgaaaaatttcctgtaacatacaggatgagcatcccacatctggaaacctgaaatgctttaaaacagaaaactttttgaatactgatatgatgctcaaaggaaatactcattggtgcattttggatttcagcctcttcagatttgggatgcttgaccgctaaatacaatgcaaatatttgaaaacctggaatcaaccgacacacttctggtcccaagcattttggataaggaatactcaacctgtatatgaattgggaaagcagtgtttgggtttagcaatgtagctaatcccctttgtaataagtctatggagagagaggttatgtagaaaggttatgttcatattttgagaacatctcccatttgttaggaagggagaggagagtttgctaggaaaaaagggacctattttatttggagacaaccgttttcacctttttggtggcttaaaatcctaaccttttttggaagagtcttaactgaagcttatttttttaagagacagtaaatctgcagaaatcacttggcaataagctattttttttctttttttgagatggagttttgctcgttgcccaggctgtcagtggcacgatctttactcactgcaaccttcgcttccaggttcaagcgattctcctgccccagcctcccgagtagctgggattacaggcgcgcaccaccacgcccggctaatttttgtttctttagtagagacggggtttcaccatgttggccaggctggtctcagactcttgacctcaggagatccacccgcctcggcctcccaaagtgctgggattacaggcatgagccactgtgcctggccatacttaactttttgttttctgtttacatttggtatttattacaatttctcataccaagatctatgaatattaaatataaatttatatgctgaaaaacagtaaaagagaagaaagagaagattgatagagaaatcgagtgtactaggaatctgctgattttatttgaaggcatacattttgaggttcagactcctacagagggatctttgttttaaagtggtgctttgaaatttatttagtgaacaatttttttttaaaggtcttgttgcagtaggagaaagagcacaaaagaggtctgggaacttctctgctgcaatgaaagatctgtcaggtgagagcacgtttttgaatttcctcttaccctaatcccaccttgaattcattatttgttgcagaagttggtggaaataatttaaaactgggtatttctcccccctgcaggcaaacatcctgtgtctgctttgatggagatctgtaataaaagaaggtggcaaccacctgaatttctattggtccatgatagtggccctgatcatcgcaaacattttctctttagggtaaatatgaatttctgcattaattatatatatttattaatgtgatgacttagagggtgaggggtaaacatgatcacaggattaagattctgttcatgggtggggggtttgtatttgtagttaagtggtggggtttttaaacactgaagggtgctttaatacgacttgtcaatgtcctattttttaaaaaattggaaaagggtaaaatatagtatacaattgttattttctagttgaatgtggggaattaatttaatacttttgtcagtctttttctcaatttggagacctgctctaatttgcagtccctttcccaaatgatttggttcttcgggttgagattataatttgacttacatagtatgggttttatatttttgtaaattatttttctagcatttagtgaaaaaatacaaagctaatagatattaaagtttgatgctgttcttattgtatgtttttcttgaataggtattgagaaatggagcccttaccagacccaattgtatgtttttcttgaataggtattgataaatggaagcgcttaccagcccagctttgccagccctaataagaagcatgctaaagccacagcagctactgtggttcttcaagcaatgggccttgtaccaaaggacctcatggctaatgccacttgcttcaggagtgcctcacgtagatagattgaggttttataataatcatttcagaattttactctgcatcacaatgtatttcctctttaatgttgtaaatatttggcaatttaagacattgtgtaaaaagcaatctgtaaaaacatctccaggctttgatttttgtaccatggaaattgtatttaaccatacagggttttggtatgtttatattgtttaccttagtgatgtatttgtttaagtggctaacatccaaacgactgtttgaaggcatcagagtaatcttcagtgtggaatgttaaataacgcttttatactgtattttgtactatgatgtaactccccttccttatggctaggctactgtaacacttgcctgtaatcagtgaagggctgtgcaccttgtactatttcacaatgggttctgctggacagataatgggccagtgttattgaggtgatcaagatctgttccacagggctaatgccaccatctcccctcaaaattttgtagaggttctaaaaagaaagtggtatgttgtgtgatgatcagcactaagtcctgcattcctgttaaagccacttgggtcataagaagggagtaaaaaatgaagtctgactagaattctattgcagaggccagtacatttagtatggcattgagttgtgatatagttttactttgatgtgcattttgaatttcagctacacctagatagacgtaaaatgataattaaaatgctgtaaccaacttatctaataaaattggcaaccagccactattttgttgactatgagaaagttaaaagtttatgttaatttttagggtctgatagaatatttcatgtgtattacagtggtattcatatgctatgtctctaaactttattttcaaaagcttaaggcccaaatacaaacttctctggaataaacgtggtgttttattttctgggttataaagtgaacaaatacttagatactattatttctttacccaatgcttttgatttttaagcacttttattttaaaaatgtgaattatacagtccccccctacacacacacacacacacacacacacacacacacacacacacacacacacacacacacacacacacacacacacacacacacacacacacacacacacccctataagcacattaaatactactttgccgtgacagctcagtgtacttcacaattcttaacactattctatgtggaatacaaaatgcctttttatctgaattaacatgcatttaaaaagttttagtatatgtgaaaataaaggaattataaatcagtaggaaagatattaaggtagaagcatcaccaatcaactagctcagtagatgttgtctgtatttattttctacctttatgaaacaagaacctgctaacaggtaaatcgtaaagtaacatatttttgccctgatgccattagtcacaatgccatggggtaactgctatgtgatttcccatttgcaaggaagcatattaattcagtttctgctcaatatacaattaggttgtagggatatagatatctcatttgagttatctgagtttttcatctttatatctaaaaatctaatctgaaaatagtaaaacacatttaaaaccttagatgctactgtagtaaaagttatgtttataaacatttcagtatattccttcaacttcaagaatcttgaatttccttgctagaaggcttttttcctcaaagattccttttaggcttactttggtgttcaggatctccaattataaatgtagtctctcagcaccacattccgtaaagatgatttcccaagtaacggtatttgactaagttgctccagagtgttagggtgcaaaccacagttagtaagctccttatgaacaacctcctgtggaaatgtgtgtacaagtcagtaaaaagcacattagtctttaaacacagaagagttaaataattactatggagactgacaaataaatggctgattaatgtgattcatcctattaatagaagttgatgctaagaatttttgtagtgacaaaatcccaaaatattaatggttataagtctagccaactgagatgcatgagacaattttaaaggtcttaattctaactctaaaaaccttaagtatgttcaaaattaaaggcaaatatggttaaatacccacagtgaattgtttccttaaactataaaggaatcaggtactattgagttttggatgcaagaggaaatgaaaaagctgcccctttttggaatgggaagttcttcagtcactgttaaaactatttggactgaggccgggtgccgtggctcaagcctgtaatcccaacattttgggaggccaaggtgggcagatcacctgaagtcaggagttcaagaccagcctggccaacatggtgaaacccccgtctctaataaagatacaaaaaatagccagatgtggtggcacatgcctgtaatctcagctacttgggaggctgaggcaggagaactgtttgaacccaggaggctaaggctgcagtgagccgagactcgcgccgctgcactccagcccgggcaacagcaagactccatctcaaaaaaaaaaaaaaattgtacttggactgaattcatgaaagctacctcacataaacaacttacagacattattccttcctctagtaattcataattaagtaacagtttaattacttgaaacacaatagtgactcagcataaatgactcaatttccctccagctagtttgaggaaactacaactaaaacagtctgctcataggtgtctacttaccatatcaagtactttgtccatttgcaggcagatgttaaatacagcagttggctcgtgtggatacagtactgcagagaaagatccactctgtgaagatttgagcagcatggtcagtgaatgcagagaatgaggcatgataggacctgtaatctccaaactaaattggtctctgtatccagaaagagcttgtgtcttcacattcacactccgtgccttcatgaaaatgtaaagaaaaggaaaattaagatcatctctcaaccttttgcctagccaaaaatatgttcaatatatttccatttggggtttcctctcttttaacaattatggaataaaactatttcccaagacatctaaacaatgttatgtgagtacaaatacttagtaaattttcagcaacctttccatattaagagattttcaggtgaagtatattccagagaataccattttttcatatagtattttatctgatttagtaatacactgtcaatgcagactattggaaaaacaaaaatttaaaatccattcaattttattgctaagatttagcatgtattttgtatttacatatataatttattatgattataatcccagcactttgggaggccaaggtgggcagatcacttgaggtcaggagttcaagaccagcctggccaacatggtgaaacctcgtctctattaaaaatacaaaaaaattagccaggcatggtggtgtgagcctatagtcccagctacttgggaagctaaggcagaagaatcacctgagccccagaggcagaggttgaagaatcgcttgagcccgttaggcagagtttgcagtgagccaaaattgagccactgctctccagcctgggtgacagagcaagactccgtctctaaatagatagatgaatgaatgaatgaatgaatgaatgaatgcagggcggccaggtgcagtggctcatgcctgtaatcccagcactttgggaggccgagggcagatcatgaggtcaggagttcgagaccaccctgaccaacatggtgaaaacccgtctctacaaaaaatacaaaaaaaaaaaaaaattagccaggcgtggtggcacacgcctgggtgagagtgagattccacctcaaaaaaaaaaaaaaaaaaaaaaaaaaaaaaaaaaaaaaaaagcagggcatggcagtcctgtggtccgatactcgagaggctgaggcaggaatttcacttgagcccacatggttgaggctgcagtgagctgtgccactgcactacagcaagaccctgtctccccaaccaaaaaaagaaaataaatgttcgtataatttaaaaagaggccaggagttcaagaccagcctggccaatatggtgaaactccgtctatactaaaaatacaaaaattagctgggcgtggtggtgcccacctgtaaccccagctactcgagaggctgaggcagaagaatcgcttgaaccccagagttggaggctgcagtgagccgagatcgcaccactgcactgcagccggtgacagagtgggactccctcttaaaacaaacaaacaaaaacaaacaagaaaaaaaaaaacaaaaaaaatagctaggcttggtggtgtgtgcttgtaatcccagctactcaagaggctgaggcatggcgcgagaatcacttgaacccgggaggcaggggttgcagtgagttgagatcacgccactgcactccattcagcctggatagcagcgcaagactccatctcgaaaagaaaataaaaaggatttcatataatttatatatttccacataatttctttgatataactgtcttatataatttttgtttctttttttaatgggaggaaagcaaaatgaaaatatgtaccaagtaaaaatgctaggaggtttttttttaaatcaagaatttatcctatcaaagtaaagtacttcttaaaagctaggttatgcagacttttattaccttaagcatttgcattgtggcacctcggaaagcaacaggggacaagagggttggaggaagtcctgcctgtggacctgaggtagcaactaaactcttagagttaatcaaaaaattgagcaatgtaaaggtgttgattccttttaccaacacaacagattcaggtctgtgatccatttgtacttcatgtttctctttacgcctgaagatgacaatcaaggaaattgcaaaagcaaatctcacctaatgtggaaagcagttatcttgattctgaatcacctgagactccttttctccataatgaaatggaaatcctcttgctacctctctttaccgaatcataaggcatatgtttcaatcaaaatgttaacaatctgaatttgctacaaactgacacctaaacctaatttcttctctagtcaaaacacacctattctcccacaatcataattgaacgttttgattaaaaaaggtttaatagttcaccatttgttgatacttaggggcttatttagtattacaatggagaattagttttaatatgacctgaagataatttaagattataatcatataaaactgccaatgttaaacttctcactaacgtcattcaatgaaaattaattctagttaacaacaactgaaaggatacagcttgatagaaagtatgtctggctttttaattttatcttgcacacccatctcttccagccaggaaaaactttcctcttcatcctcatcactgatggcttgctccctaggaaattgctacagttagagtccctatttcacaagctgttcctgtgcaaatctatttcatgagtccataagtcagtggatgatataaagttattttaatcacatactccccatatcccaagcttgttccagatgctgtctccttcttatggccactttcttttattaaaggcagagaaaattcaatacctatatgaggaacaaaaatgtaactgagttgtcatttaaagtatttaacaggcatgctgtacttttagagtgtaaaaaatttgaaatgttagtttttacaaatgatctattaaggcagtagagttttcaagctttcttcacaaacctacaaacatgcataaaacgtattctccttgaaagaggttcgggaaacaacacatacatgtaacactctttcataaatcatattgtattccagttcactttttgaaaaagtactgattgggcccattaagtagatttcatgatccactaatgggtttactcagtttgaaaattttgttattaaaggggtaattggtactatagaagaatttctagaagagtatattcagatagtgactatctggcccaatatgtgttttattttagagatcagagaacactatgtggaaggaacagtttaaatcaggagtccccaacccctggactgtggactggtactggcctgtggcctgttagaaaccgggctgcacagcaggaggtgagcgactgtcgagtgaacattactgcctgagctccatctcctgtcacatcagtggtcgcattagattctcacaggggcacgaatcctactgtgaactgtgcatgtgaggcatctaggttgtgccctccttataagaatgatgatcttgtccgggcgcggtggctcacgcctgtaagcccagcactttgggaggccgaggcgggcggatcacgaggtcaggagatcgagatcgtcctggctaacacggtgaaaccccgtctctactaaaaatacaaaaaattagccgggcatggttgcaggcacctgtagtcccagctactcgggaggctgaggcaggagaatggcctgaacccaggaggcggagcttgcagtgagccgagattgcaccactgcattctagcctgggtgacagagcgagtctccatctcaaaaaaaaaaaaaaaaaaaaaaaaagaatgatcatctgatgtgtaacagtttcatcccgaaaccatcctcctcactgcccatgaaactgatccctagtgccaaaaagtttgcggactgctggattaaataattgtgggggagggaaaaaaagccagaaataaagaaataatatatttcttaatgttgctaatcaactggtaaaaggcattttaaatttaaatagcttttaggccaaaataggtttactatatagtatagtattctcactttaaacctaaacttttaccttcatttctcatagcttctcttaaacctcgagttgttggagatatgagagctgtgattaagtcacttccagctaatcctgctgctcggaacaggacagtaaactgataggtacaaacgtagaaataggggcaaagttttgtcttcagcaaattatatagagaagtaaagctcacagacctatgaagtaaaaaaattttcttaaggtattattaaacatttaatgcaatgtttataattctgaataattcagtttgatacctggtttaaaacacaacacaaatattttagataatggttttaatttttgtggttacgtatgacttagctttaaaggactgaaattggttatgaggactcgctgatgacttctcaatactttaacaaatagtgtataccacttaaacacttattttttctttaaacaaaacttaattgagaattgcctgctgactttctctgagctgctgctaaaaaaggaagcagagactgacaagaagtagcattaaagaattagggctgcgtgtttatatatatatatatatatatatatatatatactttttttttttttttgagacggagtttcgctctgtcgcccaggctggagtgcagtggcgcgatctcggctcactgcaagctctgcctcccaggttcatgccattctcctgcctcagcctcccgagtagctgtgactataggcacccgccaccacaccaggctaattttttttgtatttttagtagagacagggtttcaccgtgttagccaggatggtctcaatctcctgaccttgtgatccgcctgcctcggcctcccaaagtgctgggattacaggcgtgagccaccacacccggcctgcctgtctgtatatatttaaccaacacttatatacattctaccacaattgggtaaagaatgagtaacagctaaaaaaaaaaaaagtaaacagtttatatgttggttattaataggttcagataaaattcacaaggatctagatacccttctgccattaacgtatccagtcacaaatatgatagagaatgctgctaaaataaaattcactattgaattatacaagtttctcttactaatcttaccagtcactcattaaaacatgctgcagggttgcatcatttgaccaaggacttgtctttccagccatttttctatcagctccaatacgagggaacagtggtagccaagacaaagcagggtggagccaatagataaggctctgctggaaggtacaacggagctcagaggagagtttgggatcctaaaatccaaaggtgacagtgggcagtttttgcccattgagaaatagagaattttattaaagacaatctttaccaaacacttaggtctaagaatctttattgctttctataggaaagcattaataattgttataggaacgaaaacatagtttatccttatttgagccagatgtaatggtaagccgtagtatcagaacatttaaacatagatgggaacattttcctgtttctaccatccttaaggacaatgactaccttttttatcatgaggaataggggtgggcatgtgtgtgtaggtaacactacatccaaccctctctccaaaaggctgttttaaaagtagccagtaaacactgatacggcaaatcacaaatcatcctaatctatttattgaaaagatgtataatataccaagacctttttcagggtaatcctttttaacctagtttgagactttaaaaaaatttttttaagatagtctcactctgtcactgaggctagagtacagtggcacaatcagagctcactgcagtcttgacctcctgggcttaaacaatcctcctacctgagcctcccaagtagctgggactacaggcacccaccaccatgctcagctaatttttttttttttttttttttgtagagatggggtctcactacgttactcaggctggtctcaagcaatccccccacctcagcccccaaaatgctgagattacaggcatgggctattgtgcccagcctcctagttttgagttgatgctttaaaataatcaaaatgtatatctctaaaaccattctagaactcacaaactccacaaaattcataaaatttttcttatacaggtaagaaaatctgtaaatccatcagcccttgcaatcccacccaattgcttttcacttctttctttgtattttctttctcaaaaagccttagagaaaaataatttaacaattcttgcctgcaacactgattaatttgcaagacaagtctctaaatgtatgagcagttactcaatctgacttaaaaaaaaaaaaggtatgaaagcaccataagcaccatctgggaaagacaaaacttcctgtctttgtatctttaaatttccaaagaaaaacttaatggaaggcagcatctgctattttgcaaaggagagcatttcacacttaatttgttactttaacacataactattttatttcagagttacctgtatacttttaggcaaagtaacttctgttgccctacaatgctggacaagaccttgagcttcttcctgtgctttcaaatgatctgcccaggtaaagggttgagaagaggtgaaaaggagtcgcgttttaatactccagtccacaggtaactcagtactttttgaggacggaatatcaggctcggagaatgatacatgtgaagtctttagaaaacaaagaatgcaaaaattagtcgagtatcaagaaaaaaccttcaacctaaagattttatcagctaacatgatcactgaaaagtaaaaatcatataagctgtataataaataacatgaaaaatacattacacactgtaaaaaagtctgaaaggagtcacactaaacttttaaccatggttacctatgggaagcgggaatttgttgttgggggtaggggtggtggaggggcagatttcactttttagtttttacagttctttatggtagtatagatgtttgtattgaagtagaaatattccaagtgttaaaacattttggatcttttaagcttctgaaactctgcatccagggctaacaaagcccatatttaagaaacatttcctgacttcaaatatttcccctcaacctgtctgcttcaggtcgacgttctccacaatacaagaatttttttttttttaaattgagacggagtctccctctgtcgcctaggctgagtgaagtggtgtgatctcggctcagtaccaacctctgccgcctaggatcaagcgattctcgtgcctcgtcctcccgagtacctgggactacaggcgtgccccaccacgcctggctaatttttttgtatttttagtcgagacgggggtttcgtcatattggccaggctgttcgcgaactcctgacctcaggtgtgatccgcctgcttcagcctctcaaagtgttgggattacagacatgagccactgtgcccggccaagcattcttttatatcacaataaaatatcagagaagggggaactatcttggatagaccataagaaggtcacttatttacaagagaaactgggtcttggagaactcttctagcctgttcccattaggacaaaccgcatttatcaaactacacagcacaatggtagtagttggggaatggaaacgtgtgtgtgttaggggagaggagcaacgaggttcagtgctatgccacaacctgtggaggtgggccaggagggctggctctgagtgatgaactggagaagtcaactgcccaaagaagagtggtaaaaactgttagagagtaaaagaaaacccccacgtctatcaggcctattttagcgctggctatctttacagtcatcattactgtatcaaaccaactcctttaccttggctgatgcggtattttcatccctggttgagatgatcaagcctctctgtaaaactactttccaagcaaaatgcttctgagaagtataaatgtatttttaaaaataggctcaaatcctatgaaaaaaaagtttatacaaatacacattctaatgatatttaaaaagtattacctgaggtaattcagtaacagttgttctttcaggaaacttctcttcccatagcaaatcattttcttgattagaatctaaaaactgaggttaaatatattctcctttaaaatttaaaggatgctgaagtttgcgttaaatatgtacagagcctcacctggcatacatgtttctcaataaacgcaagtacacctaaattcagaggcaccccatccaatctatgagtttcaacacttcagttttgtgtctgaactttagtatcaaaattgaggggaacagggaccggcgtttcaaaccgaaagatccaaaaggctttgggtaagacagatgctagtgaattctgaccccacgaatcctcgacattcccccatctccagaataatttggagtgcgtgagagaagggaggccctaaatcacgggggaagcagggcttgtcacctgccccatcgaacagcgtccttgcaagatgggggctctcagggtttttcgagctcttttccaagtcacctctaagtcctctccaaggggctcctcgctgccctctggggccccctcactttcctcgggaacgcgtcccgtgagcacagcccgcagcggggtagccaggggagcgctcttcccacaaacccggccttgccagaatcgcggctcccagggcggggtaccctaaggccacgggcggccgaagtcttcgcgcccatttccttgcctcgaacgcgaggactttccatcccccattcacagctggctcaacccacgaaagacaagagccccttggcggccaggctacaagacactcaccgggaccggggcctccggctgctcgcgggccggcccgtcggggggctccgcggcgacccgcggtcggttgtccaggcgggcgaaggggttcctccgagcagcggccgggccgccgccgctgccaccgcctctgccccccgcagcagggaaagggcgaagaggcagccccgccaccagggcggctcggcgggccgccggctccgtcagctcacggggcggggaggcggcagctccacggctccgggcccttttccgtcggagccgcactacctcgggcggctttcggaagcccggtgagtagccgggcaccgaaagggccatgacgcgcggcggctgagggtagccggccgccctacagagacttcccgcgcgcgccgggcccgcccctgacgtggcgcctcgccgagctcccgcccccgacgcggccccgcctccgcccccgccggttccgagcggagcatgcgcagtgggcagcccgcgagacgcagcccgcagcggcgatcccgggtggccgtcaacgcccactgtcccagcggtgaccctgccctggcgcttctgccaggtcctcggccagagtccagtcgccaggttcagcgacgcttctggaaagtatgcgatccagggcgctgatgtgcactaccctgtggggcaccgaaatagcttaactctatttaagcccgcagcagggatgtgatcagcccggggtttggcgcctggatgaaaaggaaacaaacttgagctgcggcgatgggctgctgcttccataaacttaagagagggcagtggctactgctctcaagaggcgaggagaggggactaggccaccttcctcaacccccagagaactcagataagacgtcagcacgcttcctatgccagcgcagcctaccgacatccctcccttccccgttcccagtgcctggtcatctcagacttccaggcagctgccactggcaagttaatgggatcttctttgatcctggggaaagccggagtgaatgaatagttgaaaacacaaaatttaagtgcctatgggctaagtcttttaagacttcaaaatatactcaaatgcttaaattatgacagcaaagacttaaggaaggtgttgagaacggagttgatacaaaattaatacgttactttgatagcttagcaaaggcctgcaacagcttttatcaagagtagtgtgacttttgctgaaagcagcagttttcttcatggaaggaattttatagcaggggcaaaatatatagaaacaatgaaaaggtttttagaaaaattcccttaagatgttaattatagaattatcttgatcatttgcacaagaatttttcaaacacttttcaaatgtgtcaactgagcatcttgtcttagcagagaaacgtgcttaaaaatgcaacttgttttatcttccttggtttttctcaacaatttccaaagaaaattctggcttcaaatactggaatatgttcatccgactgaggtctgagaaagaagaaaattaaaattgaacaacttgcttttttcttccttgatttttctgaacagcttccatggaaacttttgcctcatacagtggaatgggttcatccaactgaggtctgagaaggaatgaaattagaaatgtcaggtctagttaaagataagtagaacaaacagggtggtatatgacaaatgctagtgctcaaatctattagtgtattaattaattttttgagacagagtctggctctctcatccaggctggagtgcagtggcacgatctcagctcactgcaacctccggctcccgggttcaagcaattctcatacttcagcctcctgagtagctgggattacaggcatgcaccatcaagcctggctaatttttgtatttttagtagagatgggtttcaccatgttggccaggctggtcttgaactcctagcctcaagtgatccacccaccttagcctcccaaagtgctgggattacaggcatgagccactgcacccggcctcaaatctattactttaagtaattcaaacaaattcgtccattagtgtttccaatgttaaaagtggttaagttttgaaggaaaaaaattatctactttatttactccctctttttttctgagacggagtttctcttgttgcccaggctggagtgcaatggtgtgatctcggctcactgcaaccttcacctcccaggttcaagcaattctcctgccccagcctcccagtagctgggattatgggcgttcgccaccacgctcagcgaatttttctattttttagtagagacagtgttttgccatgttggccaggctggtctcgaactcctgatctcaggtgattcacccacttcagcctcccaaagtgctgggattacaggcgtgagccaccacgcctggcctactccctcttttataactgataaacatattcaactttaaacaaatataccatggttttctctccttcaagctattggttacttcaagttgctttgggaggggtgatgaggaaaagcaaagggtgaggtacactacataatggagtgaggaaaactcacaagccacttctatctctgcgagtacctactggtgtaccaccagatacactttgataaatattaaagagcagctatttaaacgaaatataagatcagtgcaaaagtaaatgcagtttttgccattactttcaatggcaaaaaccacaattatgtttgcaccaacctaataataaaatatggaggcaacaggtacatggcgagagctaaaacaaaagtgggactgcctgccttagctccctgaaaatagaaaaacaaacaagaacaatgatttggttactttagcgtacctgaaaacaccagttgataacttctccatcacatcctttaagatacgtagctggaaggattgttaaggtggcaatgtaaaggagaattaaataaaaccattcaataagcagaggatgccaggcaggccactttctcttgtttcaagttttgcactctcagagactcaacatgttaagttagagaaattctgtaggacgtcaagtttagctctacaacagggaaatgatttgagagttggtggtgtaatagagcctaaatttccaaggacaagtgacaagagcagcaagtcaagcctggtgcttatcctaagtgctcaccactattatctcaatggatgcgaatgaaatagtgtctagttttcatttctacactacatatggcatttttagttaaaaacaattttagcacgtatatatcttactttagatgtacattcgttgaccaggctggttggttaatgggctcaaaatttgtttgcagaagccagtaaactttatgtgtgtatgatatacagtcatccctcacgcatccatgagggattggttccaggacccccatgaagaccaaaatctccagatactcaagtcccttatagaaaatagtgcagcagcttgggaaacaaggctctctacaaaaaaattaaaaattagccaggcatggtggcatgtgcctgttgccccagctactggggaggctgaggcaggaggatcccttgagcacatgggtttgaggttacagtgagctggaatgagcactgcactccagccagggcaacagagcaataccctgtctcaaaagaaaaaaaaaaagaaagaaaaaaaaaatggcctagtatttgcatataaccgaggcacatctccattatacattaagtcatctctatattacttataatacctaatgcaatgtaaatactatgtagatagtggttatgctattttttttgttttttttattgtcgtattattactttttcagagctttttttttttttttttgagacaggggccccctctgtggcccaggctagagtgcagtggcatgatcatggctcactgcagcctcaacctctcaggctctagtgatcctcagcctcccaagtagctgggaccacagcaattcaccgccacaccaggttaatttatttttatttttgtatagacagggtctccctatgttgcccgggctggtctcaaactcctgagatgaagccatcctcctgcctcagcctcccaaagtgctgggattacaggcatgagccactgcccccagcctccaaatatttttgatccttgattggttgaatccctggatgtggaaccctcagatacagggggctgatcgtatgtcactaagagaatcagaaaatgatgtaaaaatcaaagaaaaaatctatcttgctaatttaattgaaattataatactaagatcaagattctatgtaattgcccgtacttctgaattatttatggcccagaatgacacagttggaaggagatgtctctgttaaatcacaagcagcaacttagcttgtatgaactgaatgaggagggtttgcacaagtgaggactactgtatgattcaggactttagaaaatgcaaattagggctgggtgcggtggctaacgcctgtaatcccagcattttgggaggctgtagcaggtggatcacctgaggtcaagagttcgagaccagcctgaccaatatggtgaaatcctgcctctactaaaaatacaaaaattaggtgggcatggtggcatgcgcctatagtctcagctacttgggaggctgagacaggagaattgcttgaacctgggaggcagaggttgcagtgagctgagatggcgccacttcactctagccttggtgacagagcgagactctatctcaaaaaaaaaaaaaaagaaagaaagaaaatgcaaattagcaaatataagtcatttaaaacatttctttttttttgagacggagtctcgctatgttgcccaggctggagtgcagtggcacgacctcggctcactgcaagctccgcctcctgggttcatgccattctcctgcctcagcctcccgagtagctgggactacaggtgcccgccaccatgcctggttaattttttgtatttttagtagagaaggggtttcaccatgttcgccaggatggtctcaatctcctgacctcgtgatccgcccaccttggcctcccaaagtgctgggattacaggcgtgagccaccacacctggcctaaaaatatttttaaaaggaaactaaagaatataaatttactaattcacatccctgcaagttcccttcctactgctgttaataaaattcttacctgtgtgcaaagcatgtatttctgattctggaaaatgtacagtatttcatatacacatgtcatgtttcaacttggtccaaggatttgtcaaataggttaaaattgccttctcatcgggagaggtggtttgagagaattaagttatatactataagcagagcagtctagtttccaacatgtaagattcaaaactaatagctacagccgggagtggtggcccatgcctgtaatcccagcactttgggaggctgaggcgtgtggatcacctgaggttaggcgtttgagaccagcttgaccaacatggtgaaactccgtctctactaaaaaatacaaaaaattagccaggcgtggtggcgcatgtctgtaatcccagctactcaggaggctgagacaggagaattgcttgaacccaggagttggaggttgcagtgagccaagctcatgccactgcactccagcctgggcaagagtgagactctgtctcaaaaaaaaaaaaaaaaaaaaaaaaaaaatcaaaactaatagctacatagtattctaaccttaactaatgttacttttgttaactgttacttttaatagccacatggtattctccactgtagcatcattccatgttattcttaataattacaatgttattggattggacatttacttttttttttttttttgagacagagtctcgctctgtagctaagctggagtgcagtggcgcgatctcagctcactgcaaccttcactgcctgggttcaagcaattcccctgcctcagcctctggagtagctgggactacaggcgtgtgccaccacacccaactaatttttttttttttggtatttttaatagagacggggtttcatcatgttagccaggatggtctcgatttcctgacctcgtgatcccccacctcggcctcccaaagtgctgggattacaggcatgagccactgtgccagctcatgtacctttttaaaaaatgaaattaattaaaaatccttttagaaagttaaatctaattttcaaatttaataggaaatatttaatcagaaataactttaaactcatacattcactacatgaaggggttttgaaatctactccttaaaacttaacacatgcagtatactaattacgtaactttttttttttttttttttttttgagatggagtctcactctgtcaccaggctggagtgtagtagtgcaatcttggctcactgaaacctctgcctcccaggttcaagcgattcttctgcctcagcctcatgagtagctgggattacaggcatgtgccaccatgcccggcctacataactaccttaaagctccgaataaagactgtcattgctcctggagggaactggcctttatacatatcacacatatatgactagacacatttaagaaaagtaacgtatgatattcagtagagagaagtgtaaggctatgtaaatctttcttcagacacacacatatgctctatcaagtaatgataactttttttttatccaatacattaaaacttttaccaagtgctgctgcctctaagccagtcattttagaaataaaaggaattcttaagttgaccctactctaaagaggtttgcacctttctttttgaaattgtttgtatattccaaactttttattatttttactcaactggaatgatttggcttcaatcacaccagacttatctctgaatgacttttgtttcaaaaagtcaaacctatcttcatttgataaagatttcctagcattgatatttataaaacactccacaaactctttaatttagaaaagtattctgaaatgtttctgtgcaatggcaccatcataggagtaagtgtgcaacctttcaaggtgatgtgtgctttccttaatgtgaggttaaaaacaaaatcttccaggtatcttagggctcatctctgttcagaaaggagagagactgcctgagtgtgattcttgctccgccacttgctgcgtccttgagtctgtatcaacatctctgtgcttctgtttcttcacctgtgaaatggggatgataacagtacttacatctcaaaaggctgttttaatgtttaaatgaatacttgcaaggcacttggaatactgtttggaatacttaaggaaacttaactgctattattatttcctattatcgtaatgaaagaacttagtacagtacaaagttcaagccagaaactcaatcagtcgataaaaaggatataaagatattttccctgttgtacatttgacaaattccaaacttcatcattcaggaaagctaacgttgctcccttgaggaaaaggcagtggctatctggaggatccaacttggatagaatgaaacaaagactaatcaattattgtgagtttaacagcaggatgactggtatctcgagtcagaaaaacttctacacaaattaaatgatgtccaaatcacaaaaatatgcacataaactttaataacgtaaacgataatattttctatttcatggtccaaaatgatgaaacagcgaggtgataagtacatggcagatgcaaggccaatctagaatcctggtggtgaagtggtaggggtgtgtgtgtgtcttttctggccatcttcatgagggtgttggaaaatcagtgaagattggtaggtgagaattacggtatttgcatatcagccatcatgtaaatatgtaactagaatgctgaaaaatataaccttgagagatacataaacatatatagtaattccaatttgaataattaggaaattgtgataattttatatagaaatattttgctaagtatatgtcaacaatgtcaccgagaaaaaatgctatctgaaatactattaaaaattcatgccagcgtggtggctcacacctgtaatcccagcactttgggaggccgaggcaggtggatcacctgaggtcagaagttcaagaccaccctggtcaacatggtgaaaccctgtctctactaaatatacaaaaattaactgggcgtggtggcgggcgcctgtaatcccagctactcaggaggctgaggcaggagaatcgcttgaacctgggaggcagaggttgcagtgagccgagatcatgccattgtgctccagcctgggcaacaagagcgaaactttgttccaaaaaataaaaaaataaaaaaataaaataaaataaattcgtaagtcacatgtctaaatcactaaataaaattacacttcatcgtcattgaaaggatgtctctactaggcagtatttcaacattttggccaacatgttgctaaagtgaaaaaaaaagctacatttctttctgatataaaatatggaatggaaaaaaaaagctaaatttctttatttttcagatttttttctttttttttttttgagacagagtctcactctgtgacccaggctggtgtggagtggcgcaatctcggctcactacaacctccgcttcccaggttcaagtaattctcatgcctcagccctcagtctctcaaggagctgggaatataagcctgtgccaccatgcctggctaatttttgtattttttgtagagatggggtttcaccatgttggccaggctggtcttgaactcctggcctcaagtgatccgcccgccgcggcctcccatagtgctggactcataggtgtgagccaccatgcctggcccagattttatactaatttagtcataccttgcctcaaataacttaggcattattgtttgttaattacacccctttggtgtaatggtaacgctttatggtttctgatagtacctgaaggttttcttctgttgttacccagtggcctccaacaccaagaagtgtgatgatatcatgtttatgtggtagtagttgtagttttacagctggttcatcatctttactatataatctcacttgcaagggaatagttttaaaaaaagagagagagaagaaatatattttataataatctgacaaaaatttattcttcaaacaagttcttatttatttagagacaaggtcttactatgttgcccaggctggcctggactccagcaatcctccagcctcagcctcatgagtagttgggactacaggcacaggccactgtgtccgccggcactctctttttgttttttttttgagacggagtctcgctctgtcgcccaggctggagtgcagtggcgcgatctaggctcactgcaagctccgcctcccgggttcacgccatcctcctgcctcagcctcctgagtagctgggactacaagcgccgccaccatgcccggctaatttttttttgtatttttagtagagacggggtttcattgtgttagccaggatggtctcaatctcctgacctcgtgatccgcccgcctcggcctcccaaagtgctgggattacaggcatgagccacagcacccagccctccttactttttaatgtacaaatgaggaaatatttttcttagaaaaagcaacacacaatgtattctgataccttaaaatctactttttgcattaaactgatcataaaatttattcaacatttaattgtaatttattgtaaatctacttattatagaaataaataaagataaaaagtctatcttcatttgaaaaccaggcaaagtaatgtaacacataaccaaatctgacaattaacactgatagcttaatatagtgagatgaattgattcccaattaaaaaactcatagactcaagatagtcttaacataattactgaaatgtccatgtgaaaaaatgatgcaataaagtatgtatttacttccactgacagattttcctgagctattttcaaatcttagaaaatactggtttaaaaaaccacactatagtcataaccatattcatccatgattctcacattagaagataaatcctaccaaagtataaatagaagcactttgcaggctcgtaaagcctatcctttagaagtcatgctattacttaagtgtgttcagagtaagtgttaaataaatactggttaaactaaaaacattcaagaaaagtgaaactggaacaaattttgatattttccaaatagagactgcagaagtcaactatccaatcgaaggcagccacacacagcagatgggactgaaaaggcatgagaatgatgctgtgttttctgggagccactgaggaggccatgtttctagatttcttgtagcgatatgtcatttgttactctaatgtctacaccaagcttgtccaactcgcagcctgcccaggatggcattaaatgctgcccaacacaaattcgtaactttcttaaaacattataagacatttttgagtttttttttttttttttggctcataagatatcattagtgttactgtattttatgtgtggcctaagacaattcttcttccaatgtggccagggaagccaaaagattggacacccctagtctacgctgtaaaagataagcatgttctctcttacatacagcgcttacaatgagaataaagtggaagttccaatttaaattaaaaagtcttcagttaaaaacaaaacctaaaactgaacatctggtttaataagtgcattaataattatgccctggttaaattttttttcttaaattcatcaaactaaaaaaactacacaggctactaatttcataaggtacctacctccagcatctaggacaatatctactcccaggccacctgtttcttccaaacagctttcagcaacatgaactttcccattagatacatcaatcactcgggctgtaaaggacaggaaatcaggcaattgtactgttctctatgtgatcaacacaaacaaatcagggaaaaagaaaaagaaaagcaaataaatatctattcttgaaatgagttaagcaattcaaacaattactgaatttaaagggagaaagtcaatttaaattatactttttctcatctaacccaatatgggatatagcagtctaaatgaagagacttgtatatttaataaaactaaaatgtgaacattttgtggagaaggtgatccaaggctggtctgttgacacagagcactattctctacagttataggatatgttgccagaattaggaatctgaaaacacagaggtacatatataatacgacatgaaatggaagattaagtcagtttctttttttttttcagacaggttctcactccattgcccagaatggagtgcagtggtgtgatcacagcccagtgcagccttgaactcctgggttcaagcaatcctcctgccctagcctcccaagtagctaggactacaggtacatgccaccacgcatggctatttttttaatttttttttgtagggagagggtcttgctatgttgcctaagctatttttgaactcttggcttcatgtgatcctcctgccttggcctcctaaatccctgggattatagggtgagccaccacccccagctagattaagtagtttctcaagtatgttcatatttaatagtctttagagctaaaaaacataaaaatatacagatgatatgctcatctttacgatgggctacatcccaatatacccaccgtaagtcaaaaatgcactctataccccaataaaccgatcgtaacatttaaaaaatcctaaatcgaaacactgtcagctggggacagtctgtatttgtataatatggtaattatctactagaggctgtttcaccctttctcagtcatagaaatctccctctcttccccacttactctcccaaatgaagaaaaatcttaaagctaaggaaaaggagcatgatttttaggcaagtcagtaaaaattaaacagattttaattggctgcattaaaggatattagtagtatcctattaatagaatataaattattgacagaattaaaaataattctcagaattttgaactggcaaataacaacatgtttgtatttcctttctctatctttcaacaccttctagctgaagagaattcctcttagagctgctcagattagtggtgtagtccaacagagtaatctaggacttggaggcaaggaggaagaggacaaaagggaaagggggacaaagcaatctaggaaaggcaaattaacaaataagaaattttcccttcgttcatgttcttttttttaataccattcatgcttttttttttttttgagatggagtctcgctctgtcacccagtctggagtgcagtggcgcgatctcggctcactgcaagctctgcctcccaggttcacgccattctcctgcctcagcctcccgagtagctgggactacaggtgcccgccaccatgccagctaattttttttttgtatttttaatagagacaggtttcaccatgttagccagtatggtctccatctctggacctcatgatctgcccgccttggcctcccaaagtgctgggattataggtatgagccactgtgcccggtccataaagttttttttttttttttttttgggggcggactgtcgctctgttgcccaggctggagtgcactgacacgatctcggctcactgcaacctccacctcccaggttctagcaattctcctgccttagcctcctgagtagctgggattacaggcgtctgccaccacgcccagctaatttttgtatttttaatagagatggggtttcatcacgttggccaggctggtcttgaactcctcacctcaagtgatccacccgcctcggcctcccaaagtgctgggattgcagatgtgagccaccacgcccagcctgtgctctttctccattctattttcagatctcttctttttccttttctcctcctttctccagcccctgtattgccttccttctatttcttggttatctctgtcacaagcataatgtaacagtggaaataatgtgagctttactgtcagacaggcctgggttcaaatctcattccagtcctttactaggtgtatatccttggagaagctagttctctgaggcttgtctctagttcttccacacccagcctgcatcaggtgtttctaaactgcatcaaagttcacctaattcaaaattaagtaaattgttgaaaacaatggggcaaacaggaaaaaacattgaaaaatgtaagtttaaaaaaaaataattaaaattaaaactatcacttaagtaaactggggctggacatggtggctcatgcctgtaattccagcactttgggaggccaaggtgggtgcattgcttgagctcagaagtttgataccagcctaggcaacatggctaaacccgtctctacaaaaaatacaaaaaattagctgggcgtgatggcatatgcctgtagtcccagctactcaggtggctgaggtgggaggatcacctgaccctggggaggtccatactgcagtgagccacgattgtgccattgtactccagctgggtgacacagtgagaccctgtttcaaaaaaaaaaaaaaaagcaaattgggagatagcacatacactgcattttgaaactgactttcatttgggattttataaattctttttttttttttttaagattatatatagatgaggtcttctatgttgctcaggctggtctcaaactcctgggctcaagcaatcctcccatcctggcttcccaaggtgctgaggttacagttgtgagccactgcacctggccagggattttgtacttggttttacaagtacatttttaaaggtgattttccttcaaaatttcctgttttaaagtctgtgctcataatattacccacctatgggaggtctgaatctttcaaggcactgcttatcttcaaggctgcatgctgttgaaatcactttggctcctctatgatgtgctaactgaatagctattgtaccaaatgcctgtgtagaaaaaaatatacagtgggtgtatggttatagaacagaggccatatcgaattgatttctttatattatttaataaagtataattctttagtgttactttagtatattttaaaatgttatctaataggaaaagagcaaagttatgggcaagtttaataggggaaatatttgattgactttcttctttacaaggggtggtggaaaagctgcatgtcacacgctgtcactcagtctgaccacagcacataatttcaaggatggagggccacattcagacacatggccttgcaaagagaaaactgggccttgtcaatgcgatggtctaagctaattatatactatatatgggagtccagctatctctctttgaagatcaaaacacttcaaaagctccatcctgttcagacctatagggtaagtttggggaaacactactatcctgatgttggatatcaggctgaagccagtgctgaagacagctttgccttttcttcaaagaaaagcaggaagaaagcatttcatcacaagccagttagaaaataaaactataagttaatttcaagattttcttaacatttttagatgacaatattttatgtattcttttagtgtcttgaactattttttgatatatgtaatatgtttaaattaggacgtgttgatcttttgtgtgatccatctatacataaaatgccaatacttgatcaacgtaagtgtgagggtgggaaataggctacaaagctattagggaattctggactatgacttcaaaggctcatgtggcatcttaggctttgtctaacaggaatgaataaaaatggcttgtctttttaatgtaccagcagattcaaagtcataaactaatcacactaaatctaactttgatcttctattgataaaagctgcttattataacaaaataggacactggaaaaaaagtcaatcaataagctattggcaaagaattatattagcaaatggatggctcattgctaaatttcctaagtttactgtatgcttgtctgtttcttaacaaaaccattagcacctacacttgctccatccattatcagcactgattttccaggagagagatgagaaagataatgcagagctgtataggcacgcactccatcccgaatgcttcctgctgcttccgtccatgtgaccttttctggtttatgaactatcataaagaacaagaagaaacaatctgttagcaagtcccacaagtcctacctcctggatctatttctctccatctctagtactactatggccctggtccaagcccctactcccattctctctcacctacaatactttccattatttgcccatgaataattctccatataggagtcagtgtgtgtgtatttttaaaactttttatattgtgaaataaaatgtgcagaaaaagtatgtaaaatataaaatatagctggatgaataaatataaaggaaatatgcaaagttaacggtataccatcctggtggagagagagcacaaccatcaccccagcagcctcttctctcctcaccaaaggtcaccaccattctcatgcaatttcttatttgtatcactcattagtacgcattcctaaacaatacaatttcctggcctggcgtggtggctcacgcctgtaatcccagcactttgggaggccgaggcaggcagatcacgaggtcaggagatcgagaccatcctgactgacacggtgaaaccccgtctctggccgggcgtggtggctcacgcttgtaatcctagcactttgggaggccgaggcgggcggatcacgagctcaggagatcgagaccacggtgaaaccccgtctctactgaaaatacaaaaaattagccaggcgtggtggcgggcgcctgtattcccagctactcggagaggctgaggcaagagaatggtgtgaacccgggaggcagagcttgtagcgagcagagctcatgccaatgcactccagcctgggtgacacagcgagactccgtctcaaaaaaaaaaaaaaaaaaaaaaaagtagccaggcgtggtggcaggcgcctttggtcccaactactggagaggctgaggcaggagaatggtgtgaacccgggaggtggaggttgcagtgagctaagattgcaccactgcactccagcctgggtgacagagcaagactccgtctcaaaaaaaaaaaaaaaaaaatttcatattgccaaggctttaaactttatctgaatggaatcataccatatgcattcttttctaccttgctttttatgttccatattatgtttttaaggcatccattctgtggatgaggctgttagagcactttcattcttgttgttttatggcattccaatatattaaaaacaccttcatttgcttacccattgtttagctgatgaacatttgtgttgtctccaatttttgtcagttacaaacaatgctgctaagtgtgttcgtatatgaaaaatattgttacaccgtgcatgggttttcctaggatacttaaattggagtggaaatcctaggtcccaggtatattatctgttccttaactacacctttccaaagtaattgcatcaatttactttcccacagtagtgtcctgttgctgtgaatgtccttgtcaacttgtggaatgatcacatttatatatttttaccaattatgtaggtaggtaatagtttcttactatgattttaatttgctttctctgactactaaaagaggttgagcatctttccatgttcactggccatctggaattccttttgtgaattcctttttcaagtgttaatcaatttttctattgttttgtctttttcttatttagagctttacaggaattctttatatattctagagaagtcatttgttcatgtgctgtaaatattattttcaactttgtgccttctgttttcaatctctttaacagtatctttaaaaaacagaatcatcagaatgatattttaaaaagataactgacatcctaacaattccctgcttaaaatttatcaatggctttacactgtacttggaaccaaatgcaactcctaatatagtttaaaaagttccgcatgatctgaccgtgaaactattccttaacatgtttcactatttaatttttgttttgtatttatgttgtacactgatgtaatttttccgcagtacaagaattcttttttttttgagatggagtctcactctgtcgccaggctggagtgcagtggtgtgatcttggctcactgcaccctccccctcctgggttcaagcaattctcctgcctcagcctcccaagtagctgggattacaggtgcacaccaccaggcctggctaatttttgtatttttttagtagagacggggtttcaccatgttggccaggctggtctcgaactcctgacctcaggtgatctgcctaccttggcctcccaaagtgccgggattacaggtgtaagccaccacgcctggccaagaaattctttctcattttacctaagatcaactttataacactttcacagtctttaccagctctttgaaatgcttcctctagtagcaatgattcatgtggactagccagagtagtcagcactgcatttagcaacaaactagtgccatctagtgggcgaagtggagcattcaaacatgcatgttgaaatgctcagacaagagctgagaattaaaacagtaaaaacatattaagcaccaggtgatagcacacacagtactttattccttaggtaactctttaagatagctattctcccaattttacggatgatgaaatagggttcagggtaattgattaatttgtctaatgccacatagctcataaggtgaatatatgactttaaagcacatctatttcaacagtgcacgctcaatcaacgtataatttacttattgggaacatcttctatcaaaaggattgggactaccatatttttattaaaaactcaatcatgttgtccttaaagaaatgctaactgcggccaggcaaggtggctcacacctgtaatcccagcactttgggaggccaaggtaggcagatcacctgaggtcaggagtttgagactagcctggccaacatggtgaaaccccgtctctactaaaaatacaaaaattagccaggcatggtggcaggcacctgtaattccagctacttgggaggctgaggcaggagaatcgcttgaacccaggagatggaggttgcggtgagctgagatcgcgccattgcactccagactaggtgacagggcaagactttgtctcaaaaaaaaaattgcatggttagatgtgggttaatgtcaacacacttgcttttgtgttgggggtccacaggtgtttattatgttataaaaactaaacaaataaggccaggtgcagtggctcacacctgtaatcccagcactatgggaggccgagacaggcagagcacctgaggtcaggagttcaagaccagcctgaccaacatggagaaaccccatctctactaaaaatacaaaaaattagtcaggcgtggtggcgcatgcctgtaatcccagctacttgggaggctgaggcaggagaatcacttgaacccaggaggcagaggttgcagtgagctgagatcacaccattcattgcactccagcctgggcaacaagagtgcaactccatctcaaaaaacaattaaacaaataaatgcgagccatatttcagcatctaagaattataatttgatctctttctagtttagctccaaaggaataaaaacaacaatgctgaaaattttgaatgaaaaataaaattagttttaggcttgacagaattgcttaagaactgaaaagtacaaaagagttggaagaattactctactctttaactctattatcaagtttgagaaataggactaacaccacattttgggggaatgtttgaaacatagctctttggtttggtaaagaacagacttatttgagttgaaagtgactgagcactgagcactcattaaacaatcatgaaggctggcatagtggctcatacctgtaatgccagcactttgggaggccaaggcgggaagatcacttgagctcaggagttagagaccagcctgggcaacatggcaagacagtttctacaaaaaaaagttagccagacatggtggtgcatgcctattgtcccagctacttgggaggctgaggtgggaggatctcttgaacccaggagtttgaggctgcagtgaattgtgataattccacttcactgcagcctgggctacagagtaagaccctgtctcaaaaataaacaagcaaacaaaaaacaaaacaccaaagacaaattaaaaataaaaacaaattatatacaaaaaaaatcaccaggaaagtaatagaaactaaaatagagttgtggtgaactgaaagttttcccctacaaacttgccgggaaactgaaattattcccttttacaaaaggttggagctacaacagagattacaggttattcagttgagtgtcctcatttatagatgcagtcagcatgcctaggatctagcctaaaggtcacactgttagtcatcattcttttttttttaaacattgtaaattgacaagttataattgtataaatttatggggcacaaaatgatgctatgatttacgaatacaatgtggaataattaaatcaagcaagttaacatagccatcatctcaaatacttaacatattttatgatgaaaacatttgaaatttactctcagcaattttgaaatgtacaatactctattattaactatactcaccatgctgtgcaaagaactgaaaataaaaacatatcccttggctgggcgcggtggctcacgcctataatcccagcactttgggaggccgaggtgggcaggtcacctgaggtcaggagttcgagacgggcctggccagcatggagaaaccccgtctctactaaaaatacaaaaagtagccaggtgtggcggctggcacctgtaatcccagctactcgggaggctgaggcaggagaattgcttgaacctgggaggcggaggttgcagtgagccgagatcacgccattgcactccagcctgggcaataagagcaaaactccatctcatgaataaacaaataaataaaaacatatccctcctgtttagctgagattttataccctttgtccatcaacactccattctccccagcccgcagcctctgtagccaccattctactctctgcctctatgagtttgttttagattccacatagaagtgagaacatgctgtatctgcctttctgtgcctggcttatttcactcagcatagtgctctccatttccatctgtgttgtcacaaatgacacaatttcctgctttttaaaggctgaacagtattccattgtgtatatctatatcatattattcattcatctggacacttaggttgagtccacaacttggctgttgtgaatagtgctgcaatgaatatgggagtgcaagacatctgatttcaaagcttccgggaaaatatccagaaggaggattactgaatcatatggtaattctatgttttgatttttgaggaacattcatacactttccataatgactgtactagtttacattctcaccaatagcgtacaaagtttcccttttctccacattctcgccaatacttacctttcatctttttggtaacagctattctgacaggtatgagatggtatttctttgtggttttaatttgcatttccctaatgattactgatgtcgagtattttttcacatgtcttcttttgagaaatgtctattcaggtcctttgacccttttctaattgtttttttcttcttgctgttttctgagctccttctatatcactatattaaccccttatcagatgtacggcttatcaacattttcccccagtctgtaggctgtctctgcacactgttgtttcctttgctgtgtaagagctccttcttaaagtactactttttttctgagacaggctagagtgcagtggcgcaaatacagctaacagtagcctcaacctcctaggttcaagcgattcttccttctcagcctcccaagcagctgggactataggcacacaccaccatatctagttattatttatttattttttttatttcttgtagagatggggtttcaccatgttatccaggctagtctcggactcctgagctcaagcaattggctctgccttggcctcccaaagtgctgggattattggtgtgagctactgtgcttggcctagtactttttttttttaaacaaactttttgttgagatgatcttgctatgttgcccattcttaaagtctttctttccttctcttctcttttcttttcttttcagacagagtctcgctctatcgctctgttgcccaggctggagtgcagtggcgcgatctcggctcactgcaagctccacctcccaggttcacgccattctcctgcctcagcctcctgagtagctgggactacaggcacctgccaccacgcccggctaatttttttgtattttttagtagagagggggtttcactgtgttagccaggatggtctcgatctcctgaccttgtgatccgcccgcctcggcctcccaaagtgctgggattacaggcgtgagccaccatgcctagccttttttttttttttttacaaaattttatttgctggtagagacaagcaagttgccaaggctggtcttgaactcctgggctcaagcaatcctcctacctcagcctcccaaaatgttgggattataggcatgagccaccacacccagccttaaagtacttattttatgctattttatttttttgagacagagtcttgctctgttgcccaggctggagtacagtggcacaattttggctcacctctgtctcctgggttcaagcgagtctcgtgcctcatcctcttgagtagctcggactacaggcatgtgccaccacagctggctaattttttatatttttagtagagacggggttttgtcatgttggccaggctggtctcaaacttttgaggggttccacctgccttggcctcccaaagtgctgggattacaggcatgagccaccacgcctgtcgtacttcttttaaagaaacattttgctgtgttttcttcctcaaggaatatctgcaattgttttctctatatactttaatggatttctggactttaatccatcctcctgatttataaataaggtagaagaaaaaggccatttgtgtggtttgccggtcttagcttaaactttatagctagaaaatggatgctctaatttgcttttctccttctggtccatgtcataattctccagtgttcatcagtgcctaaaggaatgggccttgtttggttgttttttttttttttttttttttttgagacagagtcttactctgtcaccgaggctggagtacagtggcactgttggctcactgcaacctccgtctcctgagttcaagcgattctcctgcctcagcctcccgagtagctgggattacaggcgcccacgaccatgcccggctagtttttatatttttagtagagacgggtttcaccatgttggccaggctggtctcggactcctgacctcaggcgatccacccatctcggcctcccaaagtgctgggattacaggcatgagccaccgcgcccagccaattgttgttgtttttaataatttatcttctatagcaatttagttttggttacttaatgaaaagactccatattcacaacgtactcgaaagaacagggcaataaggccaaccattcaaggaaactctggggccaaaaataggatagtttcctgtaaaggagcccgtggcagtcctcaaatttcaaactgcacaatttcaagatagctctggattagagactctcactgcgtggtatttgaaagaggtctttatctttcaaaggaagacacacacttggctcctcactaggcttcatgtacgttccaataagtgcagccctcagatctctgaaaaagtgtcttttggaaattaatttttaataaaataataaagtattattggaaattttagatataatgaatgacattaatttaaataaaaattactttaaatttataattttagaaatgaaatgccaaagatttggtagcctagctcaagttactgtaaggacttaactgagtaagattactatttttggaagacccaaatccaaattagcctctgtccccaaaaggtctgattagagatcacattatttaagaaaagaacttaggaaaaggtttaattcaatagttcaagaacataagagaaggtatttgctactatggatatggtatgaagaacataatgaattccagcataagaaatatatgctggctgtaccactggagtcctggtgtatccactgaccacatcttcctcccctgctcacacaggtaacttccacccaactttccatcctctaccttttctctatatccttaaataacatatgcttaattttgtacatttttgaactgtatataaataaatggcatgggactgtttgtattcttctgtaacttgcttttttcactcaatgctgtttgtgagagtcatccactttgatatgtttagctcttactcattttcactgctcaatagaaattcattctatgaatattttcaattatctatttgcttggtgatggacatttgggctgtttccagtttctttcactattacaaataagctgctatcaactcttatgcagtatgcctcctagtgcacatcaaatttccataggctacatgagtggaattactaggtctggtatatatacatcattaattagataaagctaaattgttttctaacatatttgtaccaacttacactccagcacatgaaaggttccatcattccacatccttcccacactttgggatggtcattttttttttttttttgagatgaagtctcactcttgtcacccaggctggagtgcagtggtgccatctcggctccctgtaacctccacctcccgggttcaagtgattctcctgcctcagcctcccgagtagctgggattacaggcgtgcgccaacagcccagctaagattttttgtatttttagtagagacagagtttcaccatgttggccaggctggtctcaaactcctgacctcaaatgatctgctcgcctcagcgtcccaaagtgctaggatcacaggcgtgagccgctgcgcctggctgatggtcagactttttaacttttgtcagtctggtggatgcataatgttatctctaagtggttttaattgctttcccctgattacttaggagatgaagcaactgtttaatatggtttcatgaagtgtgtgtgtgtgtacatgtactttaaatattcaaaaaataaattaccataagaaaaattaaaaacgaatatttcagttaaactcaacactagtcaaaagatattagaaaccaaagataagtgctctttttttttcttttttgagacagagtctcgctctgtcacccaggctgtagtgcagtggtgcaatctcagctccatctccagagttcaagcaattctcatgcctcatcctcctgagtagctggaattataggtgcgtgtcaccacacccagctaatttttttgtcttttcagtagagaccaggttttgctatgttggcctggctggtcccaaactcctggcctcaggtgacctgcccaccttggcctcccaaagtgctgggattacaggtgtgagccaccacacctagcttgagatgagtgttcttgattctttcccgtctcaaactctccatgtactgtctaaattttatatgttttttgtttcagtcaataaccaagagtaaaaaaaaatttttaattctgattaggtatataatttaagagccaagagagaaatcacttttcaaagatcttaccatgagcagtgttagtaaaacttaaaggtctatatattgtttagtctgaatatgaattttatgaatactaattataagctagaagtattcacatgaccagccaacattttttacatacatgactggctaatgatactttattaagtacaacacttatggtagattcaaaaaaattaaaatgttattaaaccatatgtcagtgaagtaagacttatgtgagctccaaagtactgaattgctacatacccaagtaatgctcatgtactctaacaacttcacaaagtccagggtcttcagagtccaggggcaaaattcctaaaaatcaaaacaagaaattaaagggatgtaagtcaaaaattcattcctaatgagaggccagtattattacaaattttgttcagtgaaattttgaggaaggttccagtaattactagtgtggacaagaaaaaattcagaaatgggatgggaagtgcactgtgccactcctgctatcgctttcttctttcccctctgagtgacagtaagatgatggctgatgttatagaacaaagtcagagtcttgggagcatctggactccttgttaaaactctccctgatgggctgggcgtggtggctcacgcctgtaatcccagcactttgggaggccgaggcaggtgaatcatgaggtcaggagtttgagaccagcctggccaacatggagaaaccctgtctctactaaaaatataaaaaattagctgggcatagtggcaggcgcctgtaatcccagctactcaggaggctgaggcaggagaatcgcttgaacctgggaggtggaggttgtagtgagctgagattacaccactgcattccagcccggccgacagtgcgagactctgtgtcaaaaaaaaaaaaaaaaaaaattgtccctgatgggttgggcatggtggttcacacttgtaatccaacactttgggaggccaaggcaggaggattgcttgaggccaggagttcaaagccagcctggtcaacatagtgagacctcatctctacagaagaaaaatttaaagattagttggatatcatggtatgcacctgtagttctagctattgaggaggctgaggcaggaggactgcttgagtccaggagttcagggctgcaatgagccatgattacaccactgcactccagcctgggtgacaagagcaagattctgtctcaaactaagaaacaaataaacaaaattgtccttgatgcatagctaccttcctatagtttggttccatgacatacctcagtatgtttcaattctttttttttgagacagagtctcgctctgttgcctaggctggagtgcaatggcgcgatctcagcccactgcaacctccgcctcctgggttcaagcgattctcctgcctcagcctcccgagtagctgggattacaggcgtgcaccaccacgcccagctaatctttgtattattagtagagacacagtttcaccacattggccaggctggtctcgaactcctgatcttgtgatccacccacctcagcctctcaaagtgctgggattacaggtgtgagccactacacccagccagagtatgtttctaataaaatcccatttttcttctaagctagtctgattttgtttttggtttctcacaaaaagaatcttgaataatacagagtgccactgatttcctgagcagaataaaaagacaagaaagaaataatcaattctccaggataatgcctgagtcaaaggcaatactataaaaagctgatgaaaactttcttacaaatctatcctttaagaatttcaagcatgctataattttaacgctataaggctaaatattttttctttcttttctttctctcttttttttttttttttttggacaaggtctccctctgtcaccaggctggagtacagtggtgtgatcatggctcactgcatcctcaaacttccaggctcaggcgatctcccacctcagcctcctgagtagctgggaccacaggtgtgtgccaccacgcctggctaatttttgtattttttatgtagagtcgagcttttgcaatgttgcccaggctggtcttgaactactgggctcaagtgatcttcctgtcttggcctcacagagtgctaggattacaggtgtgagccaccacataatatatattatatggccctatataatacaagttatataaatgttttctaactttatgtcttccacagagaaatgaaaatttcaaggattactataaaagtcatagcctatgtttgtgtgactgtctaggatgcaggttgcaactataaaagtcatagcctatgtttgtgtgactgtctaggacacaggttgcaaaattgcaaaaatactgtggattttaaaaaacaataaaagttttaagtcaatttttagttttacaagagttgtaagagaaaagctctgtatgatttcagttgaaacggtgcatggagcttctatatggcccagtcagtcagcagccttcaagcatgtgacttgtaactttccttctccctaaagacttcagtctggccacagactaagcatctgccagaaaaaggctacaccaagcactatagcaactatgattatctttttatctataaaactgttctacagctaaatatatatattttttattatactttaagttttagggtacatgtgcacattgtgcaggttagttacatatgtatacatatgccatgctggtgcgctgcacccactaactcgtcatctagcattaggtatatctcccaatgctatccctcccccccccaaccccaccacagtccccagagtgtgatattccccttcctgtgtccatctgatctcattgttcaattcccacctatgagtgagaatatgcggtgtttggttttttgttcttgtgagttttaaatgttctgctattgcaatcaaggtcccaatttttatcatcaatagaaatttgacagtaaattccaaaaaccaggaaagcatttctttctttctttatttttttgagatggagtttcattcttcttgcccaggctggagtgcaatggtgtgatctcggctcaccacaacctctgcctcctgggtttaagcaattttcctgcctcagcctcctgagtagctgggattacaggcatgtgccaccatgcctggctaattttgtatttttagtagagacgaggtttctccatgttggtcaggctggtctcgaactcccgacctcaggtgattcgcccaccttggcctcccaacgtgctgggattacagacgtgagccacagcacccagccgggaaagtacttctatatgaagcaaggtcacagtgaacattaatagttatatagaaaaaacagagatgacggtaaaatagatgacttgaaataagactatgaactataacttaccaactacttcatcatctggttgaaagaatgataccttgcttccaactaaagagtgaagaaaattaatagttaatattacaagtttattaaatataattcttatctattaaaatacatttttaaaatctgtggatttgtaaaaagactgattttgtttaatgtggaaaaaaggaccaaaatgtcaataacattttgatggtctgtaaagactacaggatatacagcacttcaaatctggattctctagatatttgggccatgcgattattgtgaccaggagaagtatctctctctttgcctatttagttgactttattcattttttttttgagatggagttctgctcttgtcaaccaggctggagtttgtggcacgatcttggctcactgcaacctccacctcccaggttcaagtgattcttgtgccccagcctcccgagtggctgggactaatggcatgcaccatcatgcctggctaattttgtatttttagtagagacagggtttcaccaccttggccaggctggtcttgaactcctgacctcaactgatccacccgctttggcctcccgaagtgctaggattacaggtgtaaaccactgtgactggcctctatttagctgactttaaggaagaaggagtaaagaaactaatctattctatagcttctatgataattatattgttttctactcctcctgtggctagcccaatctgtctttatttttgttgcagaatctcatacaacagggaattctgagaatgcagcaggacaagccgcagacaaaactcttcagacactgagttaaagaaggaagggctttatttggccgggagcttcggcaagactcacgtctccaaaaactgagctccccaagtgagcaattcctgtcccttttaagggcttacaactctaagggggtccgtgtgagagggtcgtgatcgattgagcaagtagggggtacgtgatcgggggctgcatgcactggtaatcagaacggaacagaacaggacagggattttcacaatgcttttccatacaatgtctggaatctacagataacacaaccggttaggacaggggtcgatctttaaccaggcccagggcgtggcgctgggctgtctgcctgtggatttcatttctgccttttagtttttacttcctctttctttggaagtagaaattgggcataagatgaggggtggtctcctcccttaagaagagtgacgttaaaattactttgatttgggaaataaattcaggttggtaccaagaagttttctggaactttatagaaatgatggccgggcgcggtggctcacgcctgtaatcccagcactttgggaggccgaggcgggtggatcacgaggtcaggagatcaagaccatcccggctaacacggtgaaaccccatctctactaaaaatacaaaaaattagccgggcgtggtggtgggtgcctatagtcccagctacttgggaggctgaggcgggaggatagcgtgaacctgggaggcggagcttgcagtgagccaagactgcgccactgcactccagcctgggtgacagagcgagactccgtctcaaaaaaaaaaaaaaaaaaaagaaatgatatagttacattttctctgcatatgtagagaaaaagcctcgactatcagtcaattcatttgagtagtttcattcaatgagttacaagaggaaaggggaggaaaaaactccaaatattgttgaatgcctccttgtgcccagcattgttgtgtgtttatgcatttaaacttcacaatgtaccaataaggtaggtattattatttctatttaacagacaaggaagctgacatgaagcggtgaagtaagctggaaacctgaatctggaaatggcccctttgactggctctgtcaacaaaatggccccagagtgcatttgttgccactagcaagtaattcgaagcctggtatttctactttcaagtctttcttttggagtttgcttcttctttggctccctcctgtgccatcatcccccaatccttttggcttctgattcactatacttttatctttcccttctactgctgatccctgtcctcctaaggtcactctgactctttttttcttggtttctttcatactcctcttcttttaattgaccctcaaacagtgcattccaaagggttctttgtttacatctctcctccttttctactctatcccttggagaactcatcaattctattatttcaaatacaacctacatgctgacatttctcaaatatgtactttccagcatagatctctcacccttgagctttaactcatttaattgcttactagatattgccagtgagatgtcacttaagttccttgaactcagtaagtataaatctaaactcataatattcctccaaattggatcatcttcctttatcaaatgttggttccaattcaagcctgaacaagaactctgtaagccattcctggttctgatctgtttttaatttcccagttactaggtcctgcagactttatttcctcaatatgtcttgaatccatccctcttctccacctctgccaccactgttgaggttatggactttgctgtttcttgcctcttggtctacaacccaaccagtcctcttgcctttagactcgtttgccttacatccacccttccttcaaatgcctactctaataatctccctaaaatacaatctgatatctaaggctcaaccaaaggtctggcccttgcctatcctcctgcttcattttaggaaggcaggaattagtgttcacataatcatgaaagtattttgtacaatatcttttattctgcaatattcgaaggataatttttttttctttttcttttttttcttttgagacagggtcttgctctgttggctcaaactcctgtgctcaagccatcctctcacctctgcttcccaaagtgctgggattacaggtgtaatccaccaagcccagcctaggaggagaattttcttgacaaaatgtttctctgctaccaagtaccatacccttgacgcctgcccaggactttatcttgctctagcaataccaaactctttgtaattcttatacacatcccactttcacttgcttgtctttgctcataatatcctccctgctaggtgtgattctcaacatgcttgccccttatgatttggacatcttactccaagacgcctttcctgtttcttctggccaggttaagcaactttcttccaagcttacataataatctgctcatgtgtatatttgtctctcccctagagagtgaaccgtttaagggcaaggagttcgtttcacttatatcctaagcagttagcaattgctcattaaatgtaaaatgaatgatcatctagttattgtatttatttttctacagtctgagaaaaaagaaacataattatcatttagctatgtcagaagattacatagagtatcaaatctattctacgttaaaatcccaggtaaaactcaaatatactctaacataccttaacacatttattcattcgcataggaggtaaaagcaaacacgttaatcatgaaccacctgttagtgaatattaagtataggtctatttagaaacaaattatatcaaatgcctgatataaggcttactgttctgtatgtaaagatcattatttcatcataaaaagacaatattggtcattctattcaatatatgattacttgtggatttaaatatataacccctaaatatttaccactgtaataagctcttcacttataaaataccaattgagtcctatttttcttttcaattaaaaaaaaaaaggggccagggatggtggctcatgcctgtaatcccagcactttgggaggccgatgtgggcagatcacttgaggtcaggagttcgagaccagcctggccaacatggtgaaaccccgtctctaccaaaaaatacaaaaatttgccaggcatggtgatgagcgcctgtagccccagctacttggaaggctgaggcagagttgcttgaatctgggaggcagaggttgcagtggagcagacatcacgccactgcactccagcctgggagacagagtgagactctgaaaaaaaacaaaaacaaaacaaaacaaaacaaaaaccaaagaagctagacaaagccaggcataatgtcgtgtacccgtagaccaggggtgtccaatctttttttttttttttttttttttgagacggagtctcgctgtcgcccaggctggagtgcagtggcgcaatctcggctcactgcagctccgccccctggggttcacgccattctcctgcctcagcctcccgagtagctgggactacaggcgcccgccacctcgcccggctaattttttgtatttttagtagagacagggtttcaccgtgttagccaggatggtctcgatctcctgacctcgtgatccgcccgcctcggcctcccaaagtgctgggattacaggcgtgagccaccgcgcccggccggggtgtccaatcttttggcttccctgggccatactggaagagaaagaattgtcttgagcaacacatacaatacactaacactaaatgacagctgatgaaccaaaaaaaaaaaaacatcatgtaattttttttcaaattaatagatttttttttgagacagagtctcgcacttgtcgcccaggctggagtgcagtggcgccatctcggctcactgcaagctctgcctcccaggttcacgccattctcctgcctcagcctcccgagtagctgagactacaggcgcatgccaccacgcccagctaattttttgtatttttagtagtgacggggtttcaccgtgttagccaggatggtctcgatctcctgaccttgtgatccgcccgcctcagcctcccaaagtgctgggattacaggcatgagccactgcgcctggccaaaaaatcacataatgttttaagaaaattcacgaatttgtgttgggctgacttcaaagctgtcctgggctgcatgctggttggacaagcttgctgtagacttagctactcaggaagctgaggcagcaggattgcttgaacccaggagttaaggctgtagctatgatcaggctgggcaacacagagagaccttgtctctcaaaaaataaaaataaaaataaaaaaggacatgttcatataattaaatttaaatttgaaaggctgtatataattttatgtaccagtaaaccaattagctacatttaatctcttttaccttagaaaataaatacatatactcacatctgtatacttaccatctaatacaattccagcaatttctctcccaacaggaaataaatcctttttcatcttcatttctgccagaagctaaatcatgacaaaggcagttaacatactattgtcagaagaaatcctggactccattatatatgaggaaagcgagagtaaaagtcaaatcacagaaagagcaaatatggttcaagttttggaactgagacaaagcaaataacttcacaaaataggtttctctaaagggtaggaaaccaagaatttactgaggcattagttgttctgcaggacttaggaatgaatattattattcaaattaccattaacatcctttgtttaacatctttactctgccaagtatgaagggaaattatggccaaaacatttcttgattggctaaacactatcagtcatcttactcaggtgaagggagggtagtctggagagaagactgttgaataagggggtgtggccaatgagaacaaagggttctccattcctataccctttaaaatcacctgagttctcaaaagccttgggttagggagtgggtgagaagtagtgatggatattaacaggtaatctgccatataatttcagattcatggtgactggagtttcttttggttaaggctaaatttttaagagattggtattttattagattgtgaccaaattaactgtaagtacttgtcttttgaagtaacagggtatactgtctttaagcccgtggtttaagctcctggcacttaacactacagatgctgaacgtatttgtagataccacaatattttaggaacagtaagtaaaaagaaattaattctcttctatatttatttttcaattttctgatctcctgtattgtatacttgatggtcagaagtctctttttcaatgtggaacataatacttttcttaagatgttcatatgacattcttatagaagtactgggtgttttacagtgtttcttttctattttttttttttttttcagatggagtctcactctgtcgcccaggctggagtgcagtggtgtgatctcggctcactgcaacctccgcctcccaggttcaagcgattctcctgcctcagcctcctgagtagatgggactacaggcacgtgccaccatgcccagctaatttttgtatttttagtagagatagggtttcaccatgttggccaggatggtcttgatctcttgacttcatgatctgcctgcctcggcctcccaaagtgctgggattacaggtgtgagccactgtgcctggccacagtatttcttttatgcacatttgtatggagttaaaactatggttttagcaattgcatcctggctccttcacttaccataagcattttcttacattacccacacagttttcataaccattatgcttaacagatgtgcaatatttcattcaaccgattttactataatttactatttatttctgttagacaaggagattatttcttagacttggattttaatggatttttccattttaataaaaacatctgaaaacagaagtctgcagacaaggtctagtactagtactcttgtgaaaagacttcaggggatcccactaatgcatttctcaagtcatgctcatgttacagagttgcccagtgaaagcctatacctggtctgtaatttcctaagtgtgactttatcaaagaagacttttaggttcctaaaaattatagtcacattataatccaataagttacgggtcatgtaaactatggcattaatcctaaaaaataaaacaaaacaaacaaaaaaacggagtaaatggacctgctcaatttatcatggcacatttaaccacagtttatttaccactgaaaacattctatgtatttcatggtcaataatgaaagattactgcagggtaatgtgaggtaaagatgtatgtttatgagagagcgacacaaaaagaaatgacaagagaaatatgaaccataactagtaatattagttaaatatctaattggtagctaataaactgattaggtttctagtttctattttattatttatttcttccttaataataggctttgttaattataaactcttagttttttgcaatgtaaaggagtttataaaatattataaaatatttacattatgtctgttttcttataaaatatttgtattttcatataaaatacgtaacttcaatcagactaataatgtcccttatatagaaatatacaaaagcacactaaattttttcccctagctgttctattctaaagatggtaggctgggcgcagtggctcatgcctggaatcccagcactttgggagaccgaggcaggtggatcccctgaggtcaggagtttgagaccagcctggccaacatggcaaaacccatttttatgaaaaaacatacaaaaattagctgggtgtggtggtgcgctcctgtgatcctagctactcaggagtctgagacaggagaattgcttgaacccaggaggcagaggttgcagtgagctgagattgcaccactgcactccagcctgggcaacaagagtgaaactccgtctcaaataaaaaaattaacaaaaatgaagatggtaataaattcttcacattgagaggtcagttatcgttatatttatacactaaatacactaagaaactctcattttactttgtgccataataaaagaaccaatacctttgtatttatctggctcagagcacaagctttaacttgaagtttcacaaagttatcctctgtaacaggaagatcttcctagaaccaaatgataacaaaacaatatgttattttacacattcctatgagaatatgtctttatgctgtgaaaatttttacatgtaattaaacaaaattagacagaccctaaatctcacagctaattttaacaactataagtaattatagaaatgtatataataaaaaaataaagaaaatttgggggtacaattttaaaaaagcttttggatacatatttttaaaagtactcaaataacaatatggatatatatgtagacaataaagttaggataacaaagtaaagcagcaaatactgtactcctttatttcaacctaaataatctcagaacaccggctcttcacatttacagggatatccttaaacacatatacacataacgtataacctttactgatttttttttttttttgagacagagtcttgctctgtcacccaggctggagtgcggtggcgcgatctcggctcactgcaagctctgcctcccgggttcatgccattctcctgcctcagcctccacagtagctgggattacaggcacccgccaccatgcccagctaattttttgtattttcagtagagacggggtttcactgtgttagccaggatggtctcgatctcctgaccttgtgatccgcccgcctcggcctcccaaagtgctgggattataggagtgagccaccacgcccagcaggcctttactaatttttagaatttcctttttttgttggttttgttttgagacagggtctcactctgtctcccacgcgggaatgcagtggcgcaatcacagctcactgcagcctcaacctccaaggcttaagtgatcctcctgcctcagccttctgagtagctggggttacaggcatgcaccaccacacccagctgatttttaatttttttgtagggctggggtattgctatgttgcccaggctggtctctaagtcctgggctcaagcaatcctcatgcctcagcctcccaaagtgctgggattaaaagcataagacatagtgcccagcccttaaattttcttaacgctataagtgaaattcttttttaaaaatataattaaaaaaaaatagagatggtgtctcgctgagttgcccaggttggtcttgagctcctgggctaaagtgatcctcctgtcttggccttccaaagtgctgggattacaggtatgagccgctgtgcccagccagtgaaattcttttttcatttttttttgagatacccaggctggagtgcagtggcgcaatctcagctcactgcaacctctgcctcccgagttcaagtgattctcctgcctcagcctcctgagtagctgggattacaggcatgagccactatgcctggctaatttttttttgtatttttagtagaagatggggtttcaccatgttggccaggttggtcttgaactcctgacctcaggtgatctgcctgccttggcctcccaaagtgctgggattgcaggcgtaagccactgtgcctggctagccagtggaattctttagcgtcctttattcaactcttccttaacatgtgccttgggcatttcatcatgccccatgggattctgggctcaacataccaacgtaattgaacctaattatccctcagattccacttctagatagaaattcaaaagcaaggccgggcatgggggctcacgcctgtcatcccagcactttgggaggccgaggtaagtggatcacttaaggtcaggagtttgagaccagcctggccaacatggtgaaacccggtctctactaaaaatacaaaaaatagctgggcatggttgcgcatgcctgtagtcccaggtacttgggaggctgagacaggagaactgcttgaacccaggaggtggaggttgcagcgagctgatattgtgccactgcactccagcctgggtgacagagcgagaccctgtctcaaaaaaaaaaaaaaagaaaaagaaaagaaattcaaaggcaaaaatagtccaaattcagacactcaatgtcatccacctatattattaaatacagtatcacctcatctaaacaactgaacctggtactaataattaaatcagtctcctctacccaatatgcccacaattagatgaaaagctagccaagaatagccacttacatagcccctcctgtgatgtatcaaagggattactgtgttttgtcatgaacacaatctgagaacatctttttaaatcacagttttgacaaaacttggtgataatatgaagatgttcattaatattggtgagtttgtgaattttactcatgattttgtgaacctggagatgtttcttcccaagagccaatcaacccctgaccctcatcctgatcaatgatagaagccaagctgtctgaaacacagactcctggcctaattgttcttgtttttttgagacagggtcttgctctatcacccaggctggagtgctctggtgtgaacatggctcactgtagccttgacctacacaggtgggtgccaccatgcccagctaatttttttggtagaaataggggtctcacttttttgcccaggctggtcttgaattcctgggcttaagtgatcctcctgcctcagcctcccaaagtgctgggattacaggcgtgtgccactgtgcctggcctaaatgttttaggagttagtgacagacaagagagaaaactggattgtgttcacgatcaaaactctcataattattatgaaatactgatttacatataacacttacttttaatccctaaatttatggaagaatgattttggcttgccacaaatctttctaataatcaccaatactgtatatgaaaattctactatctatgcttaaagtaataaaaaacttggtgataatatgaatatgagtgatcatttaaaacttagtaaatcaggtaacttcagcactctctgaaatgtgtatggaaaataatatctttctacctcttccatttcacatatgagacatggtttttttttttttttttttttttgagaccgagtcttgctctcctgcccaggctggagtgcagtggcgtgatctccactcactacaaactccgcctcccgggttcataccattctcctgcctcagcctcctgagtagctgggactacaggcacatgccaccacgcctggctaatttttttttatttttagtagagacagggtttcaccgtgttagccaggacggtctcgatctcctgacctcatgatctgcctgccttggccttccaaagtgctgggattataggcgtaagccaccgcacctggccgagacaaggtcttttctgaaacatggctactttctggaaacttgcattattgtggtattcggaatacattgggttactttcacaacatgtaagactattaagtttgttctgtcttcctaataccttttacactaccaccctgaggaactaaaaactcttttgcagtaattcttttaaaaatattttttaaagtaaggtagtgtaatgcctccagctttattcttttggtcaagatggcttttgctattcagagtcttttgtggttccatatgatttttaggattatttttctatttctgtgaataatgccactggcattttgatagggattgaattgagtctgtagagggctttgggtagtatggacattttaacaatattaattcttccaattaatgaacatagactatctttccacttattactgttctcttcaatttcttccatcaatatttatagttttcatcgtagagatatttcacctccttggttaaatttattcctgggcattttattttttatagctattataaatggggttgccttcttaatttctttctttttttttttttttttgagacaagtcttgccctgtcgcccagactggggtgcagtgtcaagatcacggctcactgcagccttgacctcctgggctcaagtgatccttccgccttagcctcccaagtagctgggactacaggtgtcagccagcatgcctggttaactcaaaaaaatttttttttttgtagagacagggtctccctatgttgcccaggctgaacttgaactcctgggctcaagtgatcttccatccttggtctcccaaagtgctgggattataggcacctggccttttaatttcttttttagatagtttgctgtcgctacagagaactactactcggccaggcgcggtggctcacgcctataattccagcactttgggaggctgaggtgggaggatagcttgagcccaggaatttgagaccagcctgggcaacatggcaaaacctgcctctaccaaaaaaaaaaaaaagttagtcagacagacatggtggcacatgtctgtagtctcagttactcaggaagctgaggtgggagctgatgctgggggaggttgcagtgagcccagattgcgccactgtattccagtgtgggtgatggcgcaagaccctgtctcaaaaaacaacaacaacaacaacaacaaagaactgctactgattttttttcttttggagatggagtcttgctctgttgcccaggctgtagtgcagtggcacaatcttggctcactacaacctctgcctcttgggttcaagcaatgatcctgcctcagcctcccgagtaactgggactagaggcgcacgccaccacacccggctaattttttgtatttttagtagagatggggtttcaccgtgttgcccaggctggtcttgaactcttgagctcaggcaatccacccgccttggcctcccaaagtgctgggattacaggcgtgagccaccatgcccagcctcctactgattttttatttcgtatcctataactttactgattcattaattagttctaactggtttttggtggagtctgtagggttttctatatataagatcacgtcatctgcaaacagggatggtttgactttcttctttccaattcgaatgctctttctttctttctcttgcctaattgctctggctaggacttctattattatgttgaatagaagtagtgaaagtgggcatccttgccttgttccagattttagaggaaaagcttccaactttttcctgttcagtatgatgttagctgcaggtttgttatacatggcttttattatattgatgtatattcattctatgcctaatttatgtaggatttttatcatgaagggatgttacatttcattatatggtttttctgtatctattgagatgatcagagggtttatgtccttcattctgttaatgtgatgtatcacatttattgatttacttatgttgaactatccttgcatccctgggatgaacaccactcgatcatggccgtcagggaaatagatatcaaaaccacaggaagatatcccctcatccccattagaatggctattatcaaaaagacaacaagtaacaaatgccggtaaggatgtggagaatggaaactcttatacaccactggtggtcatgtaaattagtatagccattatggacaaaaatatgaatgttcctcaaaaaattaaaaatagaactaccaggctgggcgcagtggctcatgcctataatcctagcactttgggaggctgaggcgagcggatcacctgaggtcgggggtttgagaccagcctggccaacatggcgaaaccctgtctctactaaaaatacaaaaattagccaggtgtgatggtgcgtgcctgtaatctcagctactcaggaggctgaggtaggagaatcacttgaacctgggaggcagaggttgcagtgaggtgggatggcaccactgccctccagcctgggcaacagagtgagactctgtcgcaattaaaaaaaaaaaaaaagaactatcatttaatccaacaatccctctcctgggtatacatacatccaaaggaaatgaaagcaatatgtcaaagtgatatctgtacctccatgtttactgcagcactattcacaacagcaaagatatggaatcaacctaagcgtccatcaacaaatgaatgggtaaagaaaatgtggtatatatacacaacagaatactattcagccataaaaagagtaaaatcctgtcatttgtgaaaatgtggatgaatcttgagaacgctgtgttaagtgaaataagctaagcacagaatgacaaatattacatgatctcactcaaatatggaatctaagacagttgattgcatagacgtagagagtccaataatggttattagaggctggggagattaaaggggtgggagctggggacagaggttggtcaacaggtacaaagttacaggtagatggaaggaataggttctggtgttctattgtacagcaaggtgactatagttaacaacgtattgcatatttcaaaatagctagaagagaggattttaaatgacacaacaaaatggcaagtattttactgatagatatgctaattaccctgatttgatcattacataatttatacatgaatcaaaacatcacagggtaccccataaatatgtacaattatgtgccaattaaaaacaaaataaaacttaaaaaatagttaaactactatatgaaccaccattttcacataaaatttaaaggaaagtactgtaatttgaggagtttcatttgagtaattttgttcattaagtctcactgaaaataacgtcatttaaaagtgggtttattgcagataaaaatacactaactactttaatgattaaacattttttcttaccttttcttgaaatacaaatgttatttcttcatctgtggaactctgttggaaatataagcctttcatagtcacctaaaaataaatatatataaatgaaataaaataacaagtcttccagactaaatgtaagcaaaaatggaaaaacagtgctggcaaaggataaaacgacaactacaaatgtagttttcaaataagtaaatttaaaaaatctttcacaaagtgatcaaataagagaatatgcaacactctctgggcacctgtcttactgagaatgggtttacagttcaaccttttactacaaaggcaaacatgcttcattttactttcctatacaataaaaaagattacttaaaagaagccttatgatggccagagaaactcaattttatttaccttttattaaattttcctttaattaccgtttatgaaaggctttcgaagtcttaaagatcattaaaaaggagaaagtgaacagccaagacaccggttgaaaattgtggccctaattcttctgtatcagtctataaaccatttaatggaagtatttaaacttatagccgggcacagtggctcacgcctgtaatcccagcactttgggaggccaaggcaggcagatcatctgaggtcaggagttcgagatcagcctgaccgacatggagaaaccccatctctactaaaaaaaaaaaaaaaaaaaaaattagccaggtgtggcggtgcgtgcctgtaatcctagctactcaagaggctgagacaggagaaccgcttaaacctgggaagcataggttgcggtgagccgagatcgcgccattgcacttcagcctggggaacaagagcgaaactctgtctcaaaaaaataataaaataaaataaataaacttatattctgtgaacttatttatttatttttttttagatggagtctcgccctattgcccaggctggagtgtagtggcacgatcttggctcactgcaacctccgtttcccaggttcaagcgatccgcctgcctcagcccccctagtagctgggattacaggcacgcgccaccatgcccggctaaattttgtatttttagtacagatggggattcaccacgttggccaggctggtctcgaactcctgatctcaggtgatccacccgcctcggcctcccaaagtgctgggattacaggcatgagtcaccgcgcccggctctgtgaacttcttgaggtatctctaaagattccacaattgtttctttaattttcagagtaattatgtggtaagactattttttatgcaaattttacagaagtataaaatatagaaaagtacacaaatccttgaagcgcataacttgttgaattttacagtgtgaatatgcccacatcatggcaggagacacatcatcatacacctccagaagttccctgtgtccccttctcctcctaaggagacccaatatcctaaattttaacagcacagattagttttgtctgcttttgaactttatataaataaaattatactctttaatgtctgttttctttctttctatattaggtttgtgagtctcactcatgttgttacttgtagttgtattccattcattcgtattgctacatagtactccactgtataaacaaattgctatttatccattccactatagacagacacttgaattgtttccagtttggggctcttatgaattgttctgttaaaaacattcttgtatatactttttggtaagaatactattatttcatttattctatgaatgaggaaagtgagtcttagcttaaagcatgtagctggtgtctcatagcaccagctgggccagaactgggatataaactaggtgctacttcttccaaagtcattactcctaaccatggcttttaatggtttcctactgagctgctaacattagatatatcaattaaagttgaatactttttttttttcttttttttgcaacagagtcttgctctgtcgccaggctggagggcgcagtctcggctcactgcaacctccatctcccaggttcaagcgattctcctgcctcagccacccgagtagttgggactataggcacgtgccaccacacttggctagtttttgtatttttagtagagagggggtttcaccatgttggccaagatggtcttgatctcctcaccttgtgatccgtctgcctcggcctcccgaaatgctgggattacaggcatgagccaccgcacccggcctaaagtggaatacctttaagataataattaagtacctattgatagttctggctacataatttgcagagcctagtgcaaaatggaaatgtgggaagccttgtctagaaattattagaatttcaagatagcagagcatgaaatcaagcaaaagtctcttctgaatctgaggtcagtgagactgcataggccatatgtccataaagccagccctctgtgttgaatgttagtggatctacttggatccaaatacgtaaagagtttttacagagtgtagttgagcaatggttgttggtttctcggacgtgataatcaaacgctggaattaacagaaatgaatacacattcaagacatatatagaaattacgtatgtagcatgtatcaatgaagtatataaaagcaggattaagctaggttaaatgattaattctaacgctttggttgcagaaggtctttgtgtcaatgtttttgtttgggggctggggagaaccgaagcatggatacaacatttacgtattccctccagcattaaatctaacctcctttgaaggctctctaaaatgcatactctctctccctactctaccttactgcttccacaatgtccaagcacataccctctatctagttagtatgactttacatcatatggttaccccatctcagagcttctaggcatggcctgttctctgacagaatgctgtaatttagattctgctaagtaaataaagttcaagttctaccccctctctggaatcatccccagtgacactcactccatttgttccatgcttcccgatttcattacacactaatgaaaccttgctttatttatttactaactagcgggctttcccaaccattgcctgggaaatatatccattattattaaataaaaaaaaaaacaactctgttcctactcagtctggagttactagaattgcctttttgagaagtggaacaattacgtatcaatgccttgatttcaaagcatcttgctttgtgatactggaagctactgttttctctgcccattgaatcttgaaatatatggcatgtctcccagataagcagtcacatggaccttagactgtgccccaatttcaaagaccctggaagataactgcttgtttgtacccctagtatcccttaaaacaaacaacaacaacaatatatatatatatatatatatataaaataatggcaatatttttagtcacatcatcctaaatagtttctctaaattaggtgaaaattgccctggttggtggaaaaaagtaatgttcagttggtccaattgagaattgtatgggaacaaaaatatccttaaagttacaaagtaaagaaagagaggtgtttttacaaaagtagccagaagaaaactgaggaaatatttgtcttgaaagcccaaaaaaagaatactgagttcctagtactaggaaaatggtagaatggatggtattcaaggcccacatggtttcctaggcagattaaataaaacagtctattacgtaacaaaattgtatttcattttattttttgttttttgtctcacactctgccaagtctcatgttatttaataaaatttgtattgacttaaaatacatttgcacataggacataaaagtattaaacttttttttttttttttttttttgagacggagtctcgctctgtcgcccaggctggagtgcagtggcgccatctcagctcactgcaagctccgcctcctgggttcacgccattctcctgcctccgcctccggagtagctgggactacaggcgcccaccaccacacctggctaaattttttttgtattttttagtacagacggggtttcaccgtgttagctaggatggtcttgatctcctgaccttgtgatccgcctgcctcggcctcccaaagtgctgggattataggcgtgagccaccgcgcccggccataaaagtattaaacattttataaaataaaaatataaattaaaatgtataggccgggcatggtgctcacgcctgtaaccagaactttgggagaccgaggcgggtggatcatgaggtcaatagatacagaccatcctggccaagatggtgaaatcctgtctctactaaaaatacaaaaattagctgggcgtggtggcgtatgcctgtagtcccagctactcgggaggctgaggcaggagaatcgcttgaatctgggaggcagaggttgcagtgagctgagatcgcgccactgcactccagcctggcaacacagcgaggctttgtctcaaaaataaataaatgaacaaataaataaaacaaaatatataatatgacatttctaagaaaagtcatgtaacttcaaaattataagttctactataaattttactataccaaaaaagtatgatataaaactttttgcccagagtggtggctcacacctgtcatcccaacaatttgggaggaggctggggtaggaggactgcttcagcccaggagttccacagcctgggcaacaaagcaagaccctgtctcttaaaatacaataaataaataaataagcctggcgtagtggtgctcacctgtagttctatctaggcattggaggctgctttgagctataatcaacactgcactccagcctggacaacagagtgaaaccctgtctcttaaacatacaaaactttttaattacaataaacctgtttaaaaatgtaggctgatatagcctgtgaaaagcatagaaattttatacttttacaggtatatcagaatttcaaaatgtttgaattaatccacaaactgaggattatgttagtaatactataaatttttatattggccatacagtaaacttactaaaaaatctggagaaacaaaaattaaggagataataccaatttagaataatttttagcaaaagcagaacgagaactttgcataaattaaacacttgactacaaacacttcaagaaagtagttaataaaaatactgatctgttaagggatttctaaaaaatcaatgggaagtagtttcaaatggtttcatccttcttataatagcaacatgaactccacttgctcctctgttacactcaatcccccaagaagctcatctattcttttttctttttagacagtttcactctgtcgcccaggctagagtgcagtggcgcgatgtcggctcactgcaagctccgcctccggggttcacgccattctcctgtttcagcttcccgagtagctgggactacaggcgcccgccactgcgcccggctaattttttgtataaaactcatctattcttagttgtaaataaaacctctacaaatcattccttacctacactttcaggccaaaagtgttttgagcatcagaccaacttcaaatttaacagacacaaagctggactcatctttcccccaaacaagattttgctgtactctctagtcatcaagaataatttagatcgctgggcgcggtggctcacgcctgtaatcccagcatttttggaggccgaggcgggcggatcacgaggtcaggagatggcgactatcctggctaacacggtgaaaccccgtctctactaaaaatacaaaaaattagccgggcgtggtggcgggtgcctgtagtcccagctacttgggaggctgagaagggagaatggcatgaatccggaaggcggagcttgcagtgagccgagatcgcgccactgcactccagcctgggcgacagagcgagactctgtctcaaaaaaaaaaaaaaaaagagtaccttagatccatcccatcaccttcacctcaatgcctggggctcgggctgtggcgataggctgccaaatgctttcaatactctccctcattcaactcatctattcccctatggttaatttaattcctgaaagtccaaactcctcttcttacatgctcaaatttttattagtccccaacacaaactttataatactatggccactccaggttcagagttcggttataatgtttctaacctaccttcatttttaaggaaagcaaagatatatataaacagctacacaagagaaaaacatatatatatatatatatatatatatatacacacacacacacatataaacagctagacaagagaaaaacagatgaagtcaactctgaaatgtggccctgtatgctcaacctggtcaccatgccaggctctcttgggcagtatccaataccctattacccatccatcgttgggacctgtgcatagcattataatactagctggattgttagggggaaatcttcagttatattttgatcatttgggaaaaggtgaattaatgttaaattttaacaatgttcacattaatctgtgagactttttgtacatattcacacattggaaaaagaaatatgcccaaatatttgattaaaaagaatatagtcaccataatcaaagcaactagctggaggtttggctcaaatatattctgcagggtgtggaggatggtagtcctaatgggtcaggtctgcttttttttttttttttttttgatacggagttttgctctgtcacccaggctggagtgcagctgcataatcttggctcactgcaacctccgcctcccggcttcaagtgattctcctgccccagcctcccgagtagctgggattacaggcgcacgctaccacacccagctaatttttttgtatctttagtagagatggggtttcaccatgttggccaggctggtctcgaactcctgacctcctgatccacccacctcggcttcccaaagtgctgggattacaggcgtgagccactgcacttggcctgcttcttaaagagggtagtgaatgcatggttataacagttgaggatatctctacatggtatagtcaacagtctctagaaatatgtatattcaaaggacactttgcactagcaatgagtccacaggtgttttgggtgttttgctgtgcacaactgcagtgctcttttgtgcctgttattatataagatgggcacaggagatattgtgacagtggcttatatctggctaaaccttgtaaagcaattccagctgataatataagaactttaggcattataacttaaaactaaatggaaaatgcgtaacattagatggtccctatcactagagggactgaaacagaggatgggtacatattacacaggcttcataaagcagattccagagtcaactgagtgggacaggtggatcaaatgaccatttagttctcttctaattgtgacaatcttgataaatattatcaaggcatattcgattgaatttatacatgtgtggcataatctctacatcttatgcaacttgagatctaaagatagataaaggagcagaaaaggaaaattgtttcttttttgcctacagtggctctcaacaaagaactcttttggatctcaaaagaatttttgatgacctccccacctccatgagggatttattttattatctgttgattttcaggtggcattttgacttaagagtctagggtttcttacatgaccaattccccacccatatctctgggggttggagacgtgggatggtcattatcccaaagatctgaaaatctctgatccagttactattcaatgtagggctatttaatataatatgatccagaacaacagaaacttaactttcatttatatttttgaatgagcatcttattttcctatattgtactactggggaacaagggagcgaacggtgtgatgaatgagtcttccctttataaggtggcttaattatgtgactctgggacaatgcaggtggaggcctctggtgatgagaataactaattgagggatcctcccgaaactctaccacacaacagttactcgctcccctccaatccatttaactgactttcttttccacctactaacattattgaagtttgtaaatgcttaattttccagttcactagaggattgtagagaaaccacttcttgcttcaaatgaaaaatatgaattgtaattttgattaaatatttactaattcaaaaatcaagagaaaataatttcatgtctttattatgcataaaatggaagacttttttttttgtaaaataccatattttagcatatatagatgtgtatttttttttttttttttgagacagggtctcactctgttgcccaggctagagtgtggtggtcgtgatcttggctcactgtaacctccgcctcccgggttcaagcaattctcctgcctcagcctcctgagtagctggaattacaggcgtgcaccaccatgcccggctaatttctgtatttttagtagacacggggtttcaccatgttggccaggctggtctcgaactcctggcctcaagtgatccacccgcctaggcctcccaaagtgctgggattacaggcgtgagccaccacgctcggccaatatgtgtatttttgctcttctgctcataaaactctcctgagctcaatgtagttcattgggtctacaaaaagagcatagttaatcttagaaatatttcattgcacaaggctggcagctttatcttgtatggcgaactacctcactttcaaatctaaacgtcttatcccctgctgtaagctggaacagaggcatcgataagggaaattagtgataaaaggtagtaattatacactgcaatggctgcgggatctgatttagaagtcataactgacccgagtttgaatcggggctttcctacttattagcggtatgactttgggctacttaattttaacctttctgggcctgagatcccatatcttagataataatagcagttatctcagagggttgccataaggattaaataatacctgcaaagcactcagcgcaacatcatactttcagaaatgttggctattttgactattatttctgtaaattgggcacatctcaattacagagaatctctaaagtagttctgaatcccatctcatagagttgcaaagggtttggtcaatgcaaccttatttttcccaccttttaatttctgcagtaggctactgtagcagccactagcacaggtggctattgagcactccaactgtgtctagtcggaattgagatgcgctgttaagtggaaaatacacatcagattttgaagatttaattttgaagaattaattttttaatttaattttgaagatttaatacgaagaaaagaacgtaaaatctcaatttttaaatatttgtttaagcgttgaaatgataatgtctcagatatactaggctaaatgaaacatataattaaaattaatttcacgtgtttcttttcactttttaaatgtagctaccccaaaattaaaatgacataagggactcgcattatatttgtactggacagagttcaggtaaaacctttctactcataacgtggacagcagcacctgggagcttcttagaaacgcagatgttcggccccgacccagacctatcccaaggcgatgcttacatctcgctccagatgattccgccgtttagcataatgaagagggccgatctggctcaaaagccacatacagcgaataactactaactgctttccgaaaacagcaaagtgatgaggaagaaagaagtggctgagaagaagtaacagagaaagaaaaagacactcaaattctaggaacaagaagcagaggagaaaaacccaacctgggagattaagtggaagggcactcccagacctctgcctccataaaagtagagggagatgcaaactgagataagacctacaatcaaaacccgtcaaggtccaggaaactgtccctcaaatctagtcttacccacccctcagcggcctcagctaagctaggcctgggcccgaacaagtcccaggttagggttcgacgcgaaccaccatcctccccagggctgcacggttctgtggggcatctctccacctttcgcttaaaggcccgtttcccaagacacaggacgcgtttcccggggctcacctgcctctgagccgccccaacggcctgcaccttcaccaccgccaccttccagtccttcgtcagagagcccgccccctgctcccattggtcaggccgctcgtcactcctgaagggcggggtcggactcgcgaggctgtccagaacgccatggcaaccggtctcggaactacatctcccgtcatgttccgctcgggggcggagaaagaggcgaggccccgccccaaggactaccaataaatgggcgaagttggaatcgcccggatgggttccgttttatgcaaattttagccgaagaccacacccttcctcattccaaccataggcccggccaacccctttgggttgtgcttcgcctttttcctttccacattattctctccttgaaaacctccaataattaagtcaattaagtgcatcctatctagtgtctctcacggcaacgagcagatgcaccgaaatcgtgcaacaaaatctccataaaccacgataggcaacctcagaccataaatctcctgttacgcctacatggggaggagggggagagtgctaatcctgcccccacacagcccctgctgattggctcattcggcttgtcactctgttgtcttacatttctttggctcaccctctttgggttcgcacggtgggcggggccagtggtagggggtggtgagaaggtgcgggccccttcttccaattggctggcggtttccccacccacttatgggcggagatggatggtggatggggggcgggggaggcagcggagggagatgaggagataggcgggagcgagggagcgagggagggagcgaaggaggtagagaagagtggaggcgccaggggagggagcgtagcttggttgctccgtagtacggcggctcgcgaggaagaatcccgagcgggctccgggacggacagagaggcgggcggggatggtgtgcggggctgcggctcctgcgtccctcccagcggcgcgtgagcggcactgatttgtccctggggcggcagcgcggacccgcccggagatgaggtgaggagagggctgcaaggcggcggcctggaccacgggcggctgcagcgggggcgggggtcggcgcgggggtctgcgcgatggctgcccggggcatccgtcccgcgcccggcgcttgtctccccggccgcccttagcccctcgccgcgcgcccgagagacggcagcggctgcccctctgccttgtccttcccgtcctcgggggtggcggcggagtggcgggcggacccgcactgggaggccgggggccgcggtgggccgtggggtggcggccgcgggacgggcgtggggatgaatgggcgccgcggccccgccgccgagcgggctccctcctctcgcggggaccccgggcggccgctccttcccgggctgacctcgctgccctcggccgccggcgaggggcggcccggcctcgcctcccgccggcctcccggggacccgcgttggcgggagcggcgccgcctctgcctggagccccggctccttcctcggcccctcgctcgcaagcctgcagaatcctgggtcagtgaagggcaggcaatgccgttcggccccagggcgcgccgcggggccgcccctgaaggcatttaaaggggagcgtcttccgcgccctgtgagcgcgtccccgggtccgccgcgtcccttcccttcttacgcaccgacacggttttgtggtgtggacccaagacacaattgcagtcccttgcttgcacgaatgcaatccgaattcccaaaaaaaggaaaccggcgaggaatcggccgcaccttcctgcgcttctgcttgccttgggattagaaaacaacttcggagattacatttcctatgggcaatcttttgttgtgattcagactcaagaaggctttgctttggaagaaatagattagcggcttctctgtggagttggaggctatagagatttttatagcctcttcaatatgaaagtttcctctagaactttgccatcatcagtgctattctgagggcagcagcaacctggaaatttagatacatgcaggctccggccagatgcgtttctttgtgcttgtctgttggcattcttctcttgctgctcctcttgatcaaaacgtacagataataaaggcaaggccaatgaagagggtagataataacagcaaatcccatacaaacaaatgcctctagaaattctcagttctgtcagcggggaggcagttttgctaatcccgtggaacggatgaaaagaaaggcacagagatctcatggattatgtagtggacaggatgtgagggcaggaactggggccaggacccagcaggccagctggtttgcatggtgccactctaaacccccaaaatatgaataggaggaatgtatttgttgggatacctttatttttagatgactttaaggttgagagtgcagaagcttaaacatccttcatagttattatttcttagtttatctctgagaacaaaatatgtttctgtttaaaatttcttttactggtgtgcttgaaacgttattttgatgggagtttccttgtaagtaaaaacattgaaaaatacatacatatgaaagaaaaatccttagtgcagatgggtttgtaaagaatccagggacttttaagtcatataaattaagaagtgagggacactaatttgatgatggtgttaaaattatttcagacacctttaagtagtccagtggagatcatttctgatagtatgatctttttttaaaaaaatggtatttctttatctaggaatgcttctgttgaaattgctacggcgcatggtaccgtcacaaaactcttttattattctgcctgagtaagagaggaaatgaacaaatttttaatgtactttggaaccctgcggattgcacagatactaagcattgtgaaatagggcataaaatgagtggtagcaagttagttctgtgaaatgtttgtcgctgttagcatttttttttttttttggcagtcgactagcaattttcttttccctaaagcttatcttcaatattggtagtagaacctctgctcaagtttatcttttccccaagtgcctagactgggacaaactatcaagcctcctgtaagagattaaggaggagctgctggtaaattcctttcctttttttttttcttgaggcagggtctggctatgtcacaggctggagtgcagtggcgcaatcttggcatactgcagcctcgacctcctgggctccagtgatcttcccaccccagcttccagagtatctgggatcacagatgcacgccaccatgcccagctaattttaaaattttttctagagacagggtctctctgtgttgctcaggctggtctaaaacgcctaccttaaacgattctcccacctaggcagcctcccaaagagctaggattagaggaatgagccaccatgcttcgtccaaattcctctactctaaattatctttttaatttgctaacatttgtgagttgtagagaattgatgacacgagagttgggattatattatgcacctcaaattcttctgccatagagctgttcccttctgaatgatcacttcctcctgaatggctccacttaactggttgggtttcttaaagtgtgggcctcagatcacttacatcagcattaatggaggcacttgttaaaaatataggttttgggcatggtggatcaaacttgtaatcccaacactttgggaggctgaagtaggaatagcttgggcccaggaatttgagaccagcttgggcaacacagggaaacctggtctctaaaaaaaaattttttttaatattctgggcttagtgactcgtgcctatattcccagcttttctagaggctgaggtgggaggatctggttcgcttgagcccaggagatggaggctgcagtgagccatgattgccctactgcattctagcctgggcgacagagagagcgagcctgtgtccaaaaagtaagtaagtaaataaatacataaaaataaatacgggtttctgtcacctcgcttcagaatcagacagctagaggtggggccctggaattggtgttgttaatgcattctccaggaatttctcctgcatagggaagttggaaaccactggcttccttctctctgagcatctcctgagactagctcctgaagtggatagaaagtttttcaagtagcagattaagttttatcccttaggctgctaataaaaaacaattgactgtgattgcgtaattttacctgtcgtacacctttcagaaggcagaggctttggttcacccctctacctccagggcctaaaacagtgcctggaggaactcaattaaacatttgttgagtgaatacgtgaattacattgcagcgaggccaatcttttaaaagttacttgtcaaattaatctatcagttagtggcatattaaagcccagcatattacaaaaaaattttttttagtagtcactgattttataaattaggagccacaagcactataccccagtgacttctgtaagtttggttagtttagaaaggagagagcctttcccaggcgtagtgtgctcaaggtgattagccagaaagaagattcagaacaaagcatttgcttagagagtcaaaatgtaaatttaagtcacagtgtagtggtaaatcatatatcaaacttatatttggtatattgtcttatatcaaaatatcattttataaaccataagtccaacatactgctataaaaattggtttctagcaaatagagaaaattgttatgttttccaatttcacttttcatactaataaaatttgacctttacaccttcttttcaagagttcaccacagggcaccatagatattatgtagttaagagctcaaactttggagaatattgtgtttgaccacacatagtcagggagtttgatctaacctctcaatgcctcatttctcagctgaacatggaaatagtaataataaagttcacatacttctaagtgcttacctaagtttttgagacacatccacttaataaatggtagttacagtgatgataaagaattggggtgtataaaaatacctaaaactcaaaagctaacccatttaattattgtactactggacttttatgatagtaagtagaaatctgttgcttaaaaaagaagtttctttggtggtgtgcgtctatagtcccagctacttcggaggctgaggtgggagaatcacttgaacccaggagatcaaggctgcagtgagctatgattgtgccactgcactctagcctgggtgacagagcaaggccctgtctcaaaaaaaaaagaaaaaaaaaagtttattgctaactccttggtactatgtataatttttttaattgaatgactagactaaacattgaaagtatttaataagctatcaaatatgtattaatataagttttgaaaataaatactaaatctcctgatctcttttaggttaaaatatagtttatgatgagcaactaatattctttgtatttaaaaagataattgttttatggtagaaaaattgaaatacagaaaagtataaagtagaaaactatgaaatacccgtaagtctactacctgcatacatatttcttcaaatccttttgtgtgtgtgcatatggctattcatatacaatttctggtaacaaaaatgggatcttgctatacatatggttgtaacctgctttttttttgcttaacatcttgtcatgagtgtcttttcctatatatatattgcattataacaattttagtaaccaaataatattccgttttatggatctatggtagttttttttttaatttttattttttcagacggagtctcagtctgttacccaggctggtgtatagtggctcaatcttggctcactgcaacctacgcttcccaggttcaaatgaatctcttgccttagcctcctgattaactgggattacacatgcctgccaccatgcctggctaatgtttgtatttttagtggagatggggtttcgtcatgttggccaggctggtctcatgctcctaacctcaggtgatccacctgcctcagcctcccaaagtgctgggatcacaggcgtgagccaccacacccagtcatggatctctggtggtttagccaatttatttttattagacattagtttgtttatttttcctccacggttacttataaccctgcagtgactgtccttctacatatgtctctgaatgtacttgtgagattattttcattaggataaatttctacaaatggaatttgcaggatcaaagcctatgctaaattttaggattttttaaatccgtatttccaatttgtcatttagaaagattgtatcattttatactcttaccatggtatatcagacttccagtctcccagccccttgtaccttcccccattttatggaatgacttaaccagtgacaaacctagtgaatttttgcttttaggaagaagaatggactgttagtataatgtgtttagtagtgtgatatggaaactcagaaatcttgtgcatgggtaatagtgatagctaatgtcgattaagttcttttgcagcatcttatatacattaactcacttcacaaaaaactctcatcttacagatgccttggaaactagggtaccagcaattagagagccagcaagtgtctgagcagatttttactgtagagtccaaaactcttagcctgtttcctagacatgttttataggcatttgggtactttttatgttctcgattgctgttgtggagtaactaagaggttctctgacatgtactaatatataaactgggtggggcacaaatttgaatccctttcactgaagagttggtcacataagttagctcagaaattagctttgggaccggtgctgtgggtcactcctgtaatcccaatacttgagaggccaaggtgggagcattacttgagcccaggagttccagactggccagggcaacatagcaagaccctacaaaaaattttttaaaaagtagcccagtgaggtgatgcccacctgtagtcctagctactagggaggctgaggtgggaggactgtttgtacccagaagttggaggctgcagatgccacagcactccagactgggcaacatagtgagatcttgtcaaaaaagaaaggggagggcagggcaagagagagagaaaagaaaggagagaaagagaaagagaaggaaggagaaagaaagaggagagagagaaaaattagcctcatcaactgtccagcattcatccttaaagtagtcttgttatcctttactctgtagtggttttcctaaagtacccctgcatgaaaaacaggattagagtgctagagaagactagtgaaatttgaaaaggcagttcacttgtgatgtggacttgtcttagaaacgcaagactgtacagaagtgtgatgagggagacagctgggtgtgtgtgtccaggtagttccatgttggcgagtttggagatagaaagtggcctaaggaagtttacttcctgaatgtgaatgttggccactttggagatagaaagtggcctaaggaagtttgcttcctgaatgtgaaggcctcagtgtagagagatatcatccactgggagatcactgaaaagtaaaccaaaacatttttattaatacatgggatggtagaatgtcactccagttttgttcctaaagttcgtagctctctaagaaagtgaattttaagcaagttaatctattttaatgcatcactgctctttcggtgtttttctagtagaattaatgataggtagcttgctttattagcttactgcccagagagaacattggtgaaattgttttggcttcagctctctggactgagtttggctgcctagctcagttttcagttggtcaccaaaacctgtcattgtttttgtgtggtatggggtctgctggagtcatgtggtagtgcgtttggcccttcattgagtggtggagccaggagttgagctgagggctgtggcagaattttgaattcaagtgaattcgaatgtgaaaataacaatgtctggccgggcgtggtggctcacacctgtaatcccagcactttgagaggccgaggtgtgcggatcatgaggtcaggagtttgagaccagcctggccaacatggtgaaaccccatctctactaaaaaatacaaaaattaggcgggcgtggtggcgcacaagtgtaatcccagctacttgggaggctgaagcaggagaattgcttcaattccctgcttgaacccaggaggtggagatttcagtgagctgacatcgcaccattacactccagccttggcgacagagcgagactctgtctcagaaaaaaaaaaaaaaaagaaagaaagaaaataacaaggtcatagcaacacagcaagtggtcagaattttacccttggtggttaaaattaaacatcctctttttaatacaggaggacaatgctcttgctcctctgttgcactggtgagcatttgatgtgttcctccttgcattatgtctgcaaatcgttctggtgtctggtggcatgcatttgcaagacatggatacagttcatggacgtggacgaggtcagctggcttttagtgtcaggctttaaccaacctagttaagaaggacgctgactcttaccataaaagcactgcaacaagattggaattggagctccaacgaattggagccattcgttttgtgtgtgtgtgtctgtttgcctgtgtgtgtgtacagggttaattacttctctgcaaggcaaatttcctgaccggttttattgttctaacacagacaaaatgttgtgtaaacacatatatcattccagtgtgttatctataataggagtgttcattgtggatccagtgtttcacaaaaatcaattcatttccgctctgaacttaagatagtagattttaaaaccaagttatctttcaatttctgaagttatctgaaactcagctgccccagtcttgcagaattggagaattgcattttggccactgatgaatgaaagctatatagctagtaatgagagaaaccttgaaaaattgacaagaaaatgagtgccattcttggtatatagcagatttcaatgaatagtagttccctttgcctttatttttcctctttcctgcacttaatataaagagctaatattaaagtcattaaatgagaatagatctgtattataggtagcactgcttatttttagaccccttcagatacagttattacaattgttgttttaatattctttaaatgattacaggaggaagaaacttggtagcggggttaccaggatgttagctccatgagggcagggagtgtatcgctgttgtccagggggctagccccaggccctagagcagcgcctgctgcctggcagacacgcaagggttatttgttggtttattaaatcaaggagtgtttgaggtccttcaagcctggaggcccgagggctctgagctggtacagagcaagtgctgggggcaagagagacaggtggggagtgaaggagagaggcccacttgggacttgactctgaatgtctgggaagtaggaagttaatgtaagttttaagcaggggagtcccatgatgtgcttttgtttaaaaatctccttctgagtatcatgtgggagtggattggaggatggatagagaggaacattccattgactcggcttccagctgtctatggatgttgacgtttctacctagccttctgctttatctttgtgatgaggataatgtggtgtactttgtgaggtctcaggaatggtttgagatgaatggtaatttgtgtaaactttccggagtttctctgaggaaaagagaaccccataaaattattactattgatcaaatgaaatagcagtgtaagacaaagatcaagaattatttagctttataaacaaattaattgaggttatgaatataggtttctataggagagattttgtttcctttttttagtgaaagaaatcttaaatgtatgggaatgaatccttaaaatagcaggcttttgcattgtctatagaagctgttctctttgaggaagatctgttttgtaaaatgctgctgttgtctgtccaatctggagttttaattagtatcaaagggagggaaatcctgcagtaatcgtaaccttactttaattcttagttcaattagttttaaaccacagtcattatctgttatctttagttgttttgatcttggtagatgaagtgattaatattacagttgtgatttggtaatttaaaaaataacatgttttttcctactacaaaaggaatacatgtttattgaagaaaacttttggaaacatatataaggaaagaagactaaaagcctaccaagatcttaccatccagtgataatgactgttaataccctgtgaaggtcaacatgctcaaattacccagcaggtgcctggtgtgaagctacttagcccgggagagttgaaggcctgttagggaccacgagcactgaaggtggcaggacggtccagggccagtcaacccagacctttgtggttctgggaggatgcgtcctggtgttactacaccttatagttatttaggagaatgtgggtttaatatgaaatcttctgatttttatgtgggccacactttttattgttaacacactggggttcaaagcatacctgagggctggattcagtcttcgttgccttgccagtttgtagcctcaggtacgtacagttttgtagcctgtgtttttcacttaatgtgttgtatttgcagccttttttgctacatcgtcatatatgtaatcagtcacttattgctggacctatagattctttgtctttttgctttttaataaagataggtaaaattcttggaccaaaagttgtttgtaaagcctttgcagcataccgctctcagatgcattccccctatcatgtaaaaggtacttgtttcctgttctcttaccaggactgggtaaaaccatctccaaaaacatcttagccaattttatttgttttaacttgcattattttctgtattaccaatgagtgtgaatgattattaaatgcctattggccttacacaaatttatttggtaaccaacttgtcttgctggaactctaagttccagcaatgttttggtcttgcattcaatgcttctcagtctttgtgattccagataatattagtactgtgttagtagcaataattagtactaattgtaggcatcgttccccaaaactgagggcatcagtatctttggcacaactataatccacttaaagtactgtgactgggaagttctttttttttttttttttgacagagtcgtgttttgttgcccaggctggagcgcagtggcacagtcttggctcactgcaacctctgcctcccgggttcaagtgattctcctgcctcagcctcctgagtagctgggactgcaggcatgtgccaccatgcccagctaatttttatattttcagtggagacggggtttcgccatgttggccaggctgatctcgaactcctcacttcagatgatctgccctcctcagcctcccaaagtgctgggattacaggcgtgagccaccgcacccagccgtgattgggaagttctgagtttagttagctgttcagtgaatgtttgagtacacgctgtatatgcctggcattgctctaggtgagtagccttgaaccaagatagaatctcagccctctaagacttctatgcttttttaaaaattctcgagtttttcatacagaccatcatgtttataaaggaccattttcattcctagaatttataatttatttttaacttgtatttctttcttttttttcttttttgagacagagtctcgctctgttgcccaggctggagtgcagtggcacgatctcagctcactgcaagctccacctcccgggatcatgccattctcctgcctcagcctcccgagtagctgggactacaggcatcagccaccacgcccagctaattttttgtatttttagtagagacggggtttcaccgtgttagccaagatggcctcgatctcctgacctcgtgatccgcccgtctcggcctcccacagttctggaattacaggcgtgagccactgcgcccggccaatgtctttcttttttttgagatgatgtcttgttatatcgcccaggatggtcttgaactgctgggttccagcagttctcctgtcgcagcctcccaaagtgctgagattataggcatgagccaccataacttgtatttgtttattggcatggaacttctaaaacagtgatgaatgcttgttaccctttaattccttccttctttccttcctctttctctttctttctctctttgtctcttctttctctcttttgtctcactctgtcacccaggctgagtgcagtggcatgaccatgattcactgtatccccaaccttccaggttcaaggaatcctcccacctcagcctcccaagtagctttgactacagccacagccacgcaccaccacacctggctaatttttttttttttttttttggagagacgatctcgctgtgttgcctaggctggtcatgaacttctggactcaagtggacctctcgcctcagcctccccaagtgctgggcttacgggcatgaaccgctgcacctggcctttgattttttaaattcactttaattatcttaagttctgttatactctagactcttagcaagagtctagaatcaacgttagttattagttccgtattttgattatgagacaaggtacaaagctgagactgtgtgatgagaacctttggaatgtatatctgacccaacacagatcccctaagtgcccttcaacctacacatccaatttcttcctacctccttctctacacaaaagacataatacattgaactcgggttgggcacctgaccaacctggcccaatcagtgttcgtttcttccctggaaatttgaaactaggctcaatagagaaggatttggccttaatatgctcaaggaccctaagtaaaggattgggagttataagcagttatgttctgctgtctggggactaagaaagatgatttatggatggggagaataaagtaactgtctaaagagaagcagagagaacactacctgactctctgacagcattaagccactctcttccagtctgttcttggtccagctgcattctcgttcttgagttcttaaggttacctccttccccttgatttaggtagctggagtttctgttactgtgaactaaacattcttctcattcttaccacaatattctttttatgatactaccttgtctctttttttttttcactatgtctagggacgttgtgaatttgttattattttctccatataataacatcaacagttaaggatagcaagaaacatggaagtaccaaaatttaatctaattcaggcaatcacaatttgattggaaaggccattttacaaatgcggactctggctcggacctgttttaaaccggtgtagatctctagctgagggaaaacaggaaggaagaaattttgaagttacttttaaatgttgcagaatttcagtggtgtcatttcctttcacatccatataaaatgttgacctcctgcaaaaaccaatactagggacattcacagtgtacagtattatgtgcatctgtatagggggtgagtctgaattctgttcaagtgtgtagccactgaaacaagattttttttttgtttgaggcagagtcttactctgtcacccaggctggagtgtgcagcggtgcaatcttggctcactgcaatctctacctcctgggttcaaacaatccccccacctcagcccccagagtgggtaggattacaggcaccaccatgcctggctaattttttttttttttttttttggtatttttagtagagatggggtttcgccatgttggctaggctggtcttgaacgcctgacccaaagtgatctgcctgctttgacctcccaaagtgctggaattacaggcgtgagccactgcgaagggccttgaaacaagactctaaagtgtactgtcgaaataccaagaagttgaatcacagaatagtttacctggggctgggcttagttcttagattagctttctgtgtcgtggtgatgtcatgtatcaggaatccttaacttaaaaaaaactcagtgataagtttaagtagtccactatctaaatgcagttgggtggggaggtggaaaaagtgatagggagagaaaaaagaggattgtaggagagagaaggaagaaaaaggaaggttgctttattgccacagttttctttattcataattgtatttgtatgagctttttcatttccaagtggaagaagcacagcattgaaatgtagtgactcacatacctgtcaagtccaaggattctgattggcctggcatgatcgtgtgtctgaacccatcatatgaccaagggaaacgtgtactctcattggctctcctgggccttgggtctaccttttcccccagttggtgagaccagtacctaaactcgtggaattaacagaaagcattaaagagaagtaggatctgtcaagaggagaaaaaaacgctaggcaggcaaaacagatggcctttactcagtgtatgatcagtgtcatacaaattaataattaataattgaagttacttttaaatgttgtagtatttcagtggtgtcatttcctttcacatacatataaaatgttgacctcatgcaaaaaccaatactacagacattcacagtgtacagtgttgtgtgcatctgtatagggggtgagtttgaattctgttcaagtgtgtagccactgaaacaagctttttttttgagacggagtctcactctgtcacccaggctggagagtgcagtggtgcaatcttggctcactgcaacctctacctccagggttcaaacggtccccccacctcagcccccggagtaggtagatcaggtctgtggcgtgccacttgttttatttatttatttatttgtttatttatttatttggcagagtctcactctatcgcccaggctggagcgcaatcgtgcgatctcggctcactgcaacctccgcctaccaggttcaagcaattctcctgcctcagcttcccaagtagatgggattacaggcgcctgccaccacgcctggctaattttttgcatttttagcatttttagtagagacggggttttaccatgttggccaggctggtcacgaactcctgacctcaggtgatccacctgcctcagcctcccaaagtgctgggattacaggcgtgagccaccatgtccggccttttttaatttttttattttaatttttagattcagagggtacatgcacaggtttgctatgtaggtttattgcatgatgctgaggtttgggcttctaatgaaccagttgcccaagtagtgaacatagcaccagataggtaggttttcaacccctgcccccgttttggaatccccagtgtttattgttcttaattttgtgtcagtgtgtacccagtgtttagttcctacttgtaagtgagaacatgcggtatttggttttctgcagaagctttcttgaccttctccttttatctctgattgtcagtttcctcttagtttcatttctttccataagcagctgtgacctcagcatgggtcatttcagctatttccttgccctgttgctctgttacatttaggacttcccaattccctttgagggcttcttatccttaaaatgttgctgtcgccagggcttttcataccctcttttgacatttcactggtcttccacggcagtcattttcactgtatttatctgtctgtacctggagcggtgtctttttttctaaccctgcatcgtgtaatgatgatgttctgataggtgattttgtctttgtgcaaacatcataaagtgtatggttgacctttgaacaagggagggattaggggtgttggtccccaacacaggcaaatccacatataagcagggctccgtggcccttgcctgtaatcccagcactttgggaggccaaagtgagaaggttgctcgagaccaggagtttgagaccatccaagcaacaaagtgagactcccatctctacaaaaattttaaaaatcagctgggcatggtggtgtactcttgtagtcccagctactagggaggctgaggcaggaggattgcttgagcccaggaatttgaggttacagtgacctgtggttgtgccagtgcactccagcctgagcgacagagccagattctgtttttaaaaaaaatcatataacctttttgactcccccaaaacgtaactactaatgacctattgttgaccagaagccttactgataacatagtccatgaacgcatactttgtatgctatatgtatgatatattctattcttacaataaactagagaaaggaaaatagtattaagaaaattataaggaagataaaatatatttactattcattaagtggaagtgggtcatcataacattcttcatcctcattgtcttcacgttgagtaggctgaggaggaggaagaagggttggtcttactgtctcaggggtgacaaaggtagaagaaaatctgaatatgagtggacccacacagttaaaactcatgttattcaagggtcaactacttatacaaaccgaggtggtatagcctactatacacctaggttatatgtatagcctattttgctccttggttacaaacccctacagcctgttactatactgaatactgtaggcagctgtaacacaagtatttacagtggtatttgtgtatcgagacatatctaaacatagaaaaggcacggtaaaaatatgctgttacaatcttacgggaccacgattgtatgtgcagttcatcattgactcaaatgttactggctgcatgactgtacctactggatccattgggcgcttaaaacttcaatacatctagagcattgctcacctgccacctttcttctgaccaacctcttcctctgtctgtatatcccatcttggtgaatgatactattatctatccttttgttcattgtttcagcagttatttattgattacttactgtgtgtcagatagtctgtggtataattttatatcattttgttcctgattcctagcacatagcttccaaaatctttggaatttcctgagtggtgggagtgtcttcttattcataatgagtccttttggatcttatctgagttcatgctaatgaactggctcctggggatgaggggctggacaccctcagaattgggggtggtccggaggaagcagtcaggaaactgcaggattggagggttggaactttcagccctccgccaccaccagctccagggaagagagagggactggaaattgagttcagtcacgtggtcagtgatctacttaatcatgcctatgcaatgaaattgcaaacgaaagccctggaactgtgaggttcggagagctgggttggtgaacccatgatgtgcagaaaggtgagtgcctatattgcacagaggaggagagggcatggaagctctgtacttcctctcccccatgctttgtgcagtgagtctcttccatttggctgttcctgagttgcacagagcttttccatgttcggtgagttgttctagtcaattacttaacttgaagtggagttaggggaacccctaaatttgtagtcagcctggcagaagtgcaagacttgaggctggcatctgaagtggggaagtcttatgggaccaagcccttgatttggggagtctgcactaactccggtagtgtcagaattgaaatgaatggtaggacacccagttagtgttggagaacattttttagaactcagtctgcctatagtatttttgaatactgtgtctatacacagtatagacttagtacctgcccttaagctagataggtgaacaagcaattataatttagctttgtaagctattcatggactaagtcagcagcctgtactttttttttttttttttttttttttgagataaaatcttgctgtgtcacccaggctggagtgcagtgagatgatcattgatcatggctaactgcagcctcaacctcccaggctcaggcaatcctctcacctcagcctcccgagtggctaggaccacagttgtacaccaccacacctggctaatttaaaaaaaaatttttgtagagatgggatctcactggtctcaaactcctaggctcaagcagccctcccacctcagcctcccaaagtgctgggattagaggtgtgagccactgcacccagcctggattctatctgatgctgaagtcggtggcttgattctgtcaattcagcctctgaaaggtcgtttgaattcaccctttctagccccactgctctggtcttagtccaggcctttatatattttttcactttactactttgctcttaatggttgctgcttcctgactcgtctggcttctctgttccacttcattttacactcacatgttgccaaaataatctttgttatgtgctgctcccacaataagatctttccccgtgcttttatctcctaaggtggtggacctcaagccttttggtatcaaaacccttgtgtcctcttaagtgattgaggtccccaaggaacttttcttcatgtggatttttgtcttatcattgtctgccagattagaaattaaaaccaagaaatttacacttaaaatagctgtaataaacctattacatgttaacataaataacatttttatgaaaactgttcacaaaacaaaaaaatttagtgaaaagtggccttgttttacattttttgcagatctctttcatgcctcactgaataaaaagatggctgaattccataactgctcctgtagtcagtttgttgtgaaacgttgttttggttgaaatagttgaagaaaatctggccttatacagatatgtagttggaaagaacaggagtcttttagtggcatttccagaaaattgtggttattttgtgatactgtaccaaaacttgacactgggtagtttcttaaggattggttgcagtgtagaatctgaagtcatataagtgaactttttatcctctgttacaataaaatctgttgatccatcctatactttgaatggctattttacccctgtttgatttgaccaatacatacaacatcatgtattggtcatttggaaaatactgggtcactgagttatgtaaatcttacaaatgttgacacatttcattaaacaatatcacaaaatcgtgtttgttatcaccacccatcttattagaaaattctttaaatgttgagaagcagtctagctcataatggcagatacaagttttccaaaattctaattttcaccccaaattcaaattttatcatgaacagcaagtactgtcagttgtttttcttgcagcatcaggcttgctttatttttgagaaactgtgccagatacccaaatctgaataatcatagttttttttggttgttgttttgccaaataaaaatcgagttcctgtaaaaaaaaaatggctagtttagctcacaactcaaatgattgcacagtgattttcttggacattgttgtttggtgtagcacataaatgctttgagtatctagtcatacaagcattaagcatgtgtactcaagggctgagatttaataaagtaataatttttcatgattcatcaaagacatcctgttgtaaaactgacttttttttttttatgtgagtgtttggcagtgaagaatccagtgaccacactggtacagtttggtgccactgctaaggtgggagcagttttacccaccattgtttttgtatcagtgtaaataaaatcacagtgaaaagagcaggtcttgcctgagtaccatcatgatgatatggtttggctgtgtccccacccaaatctcatcttgaaatgtagctcccataattcccatgcgttatgggagggacctgatgggagataactgaatcatgggggcagttcccccatactgttcttgtggtagtgagtgagtcttaggagatctgatggttttctaaggggtttcccctttcatttggctctcatttctctcttgtgaccgccatgtgagacataccttttgccttccaccatgattatgaggcctccccagccacctgtaactgtgagtccattaaacctctttttctttataaattacccagtctcggtgaaaatgaactaatacacgtaagaattttgaccatctgaacccccatgaaagggtcttaggactcccagggatccacagaccacaagagaattgctgccttgtaggataaaatctaaaccttcactcacagtttagagtgcattatgctgtatccctgttgaccttccccttttcctcttctatttctcttccatctggatctcaccatagaatgttcttttgtcactttagctttacagtttatttcccttctgcctccccctatctgtcccttatcctttaggcctaactgggtgttactgaagtgaaaatacccgtacctgccgcagctatgagtcattttccctttgatttccagcactgaacttttggctctacctctttccatctattttctagggacctctgatttaaagttccgaatttacaaatcccatcataacaggaaagcattttacatccctcttgtgacttaaacttaatttatactaatatttttcattttgaaccttcttatacctaattaaatgaaacatttgagcaaataggtgatggggtattgccttttttggggtcttctgttctgtcagaaatggtattatagttaggtctagcccagggaaaaaactgatttcctttaacagttatttgaatgatacccattttcctaatcaggaaggtttcttggtattatctaggtactgggttttatgctgccaagttcatcagttaaatggcctttagataaaggacaggttggagttgtgctcagctcatataaaatgtgctttagaaggacttctggtattatctgacccacactgcccctcatgtcacacatgtttctgcacgtacacaggatgagtactgagtacccttcatgtttcagggattctgcaggtctttcacatatgccatctaaaatttgtttttcacaattttgtgaactagatgacaagatccttgtgttacagatgaggacctcgaatttgctgccatttgtgtaatgaaaatataaatggcatagtgagtagctgaacttaaataaaaaatcattgacttaccacataaataatagtattataacattataaaacaagatttggtataaatgagctttcatcagtatagacacatctcaggcattagtctaccttgcctagaaggagcaggaattatttattgagcactgttttggatatatactgaagttccctcaaattctaatgtctcataactcttcaggcagttatagtaattgctggatataccaggaagttatgcctgtaattactgctcagaaatgaaatatgtaaactctagcattatattcatactggttttattatgagatatattaccttttagatttcttataagatctattttttagatttagcttacaaagccattaactgttataaaattatactgtaaattataagctttagttagatgggccgttaggcatagctttgctggcaactgtaaccttttatgattgcagtcaaaatgtaatccagatgctcttcgtaatagaccattgagtcagaatatcctgaatattgttttgcaggttcaaaatgttggaagagatctgaatcaggatgataaaatgacattcacccatctgattttgggcttacttctttgtgacatacctaacctggtgattaaattctttttttttttgagatggagttttgctgttgttgcccaggctggagtgcaatggcacgatctcggcttaccgcaacctccacctcccaggttcaagcaattctcctgcctcagcctcccgagtagctgggattgcaggcatgcatcaccacgcctggctaattttttgtatttttagtagagacggggtttctccgtgttgaggctggtctcgaactcctgacgtcaggtgatccgcccacctcggcctcccaaagtgctaggattacgggcgtgagccaccacacccggcctctgatgattaaattctaaaaccaagagttatttaaaagattttgtagacagtgggggttggaacttgaaagtgacccatcagctatgtagctactagcattttcctaaaaagtcctcagtgaggcagctggacaaggttgagaggcaggcagcatagccaagggattctggagccaagctgctcagctactgtcttagcccacttcgtgttgctgtaatagaatatctgaggctgggtaatttataaagaaaaaggtttatttggctcacaattctgatggctaggaaggtcaagttagagcatccggtgaggtcctcaggttgctttcactcagtgtggactcctgaatgtgatgtggatgtgaagaaactggaatcctcatacattgttggtgtgaatgtagcttggtgccgctgctgtgctaaggggagctagagagtgcagaggtcacatggtgagagaggtagtaggagcgggatgggaaggggccaggttgttaacagccagctcatgtgagaactaagagtgagaactcactcactcttggggagggccttaatctattcatgaaggatccaccccatgacctgaaaacacctcccactaagccccacctccctacactgccacagtggggaccaaatttcaacctgagatttggtggggacacatagcagttactagctgtgtaaccataagcaagctatttaacttttctgtgcctcagtttcctcatctgtagaatgaggtcgatcacagttcctgtctcataagattgttgtgaggatgttaaaacagcgcagtgcctcactaaatagtaaacactgtataagaaatgattgttattattcttatcacctgtgatccaagcctggaatttataatttaagatacgaatgaagttattatatgtagttttgttaccagttgattatatgacctctcttaatttctcagttgctctttccatcatctggaagcttcgccatttgttttaacctttgaagagatgagaggaaaagatgcatgataggcttaaattgctctcatctacttataaaaaataattagacataacgtggccaggcgcagtggctcactactgtaatcccagcactttgggaggccgaggtgggtggatcacgaggtcaggagttcgagaccagcctggccaacatggtgaaaccccgtgtctactaaaaatacaaaaattagctgggcgtggtggcgggtgcttgtaatcccagctactcgggaggctgaggcaggagaatcgcttgaacctgggaggtggaggttgcagtgagccaaggccgcaccattgcactctagcctgggtgacagaatgagactctgtctcaaaaaaaaagaaaaaaatagacataatgcaagataacgtcattaaaaagtgggcaaagacctgagtaggcatttttccaaagaagatatccaaatggtcaaccagtacatgaacagatagatgctcaaaattgttagtcattagggaaatggaaatcaaaactatgagaataccactttacaaccattagtatggctatcatttttttttaaaaaggaaaataacaagtattggtaaggatgtgaagaaactggaatcctcatatattgctggtgtgaatgtagcatggtgccacagctgtgtaaaataatttttcagctcctcaattagatagatacagagttatatggcttagcaattccattcctagctatataccaaaagaaaacaggtgttcaaacaaaaacttgtacataatattcatagcagcattatttaccatagccaaaaggtggaaacaacccaaatgtccatcaacttttgtgcatcagtggacaatgtggcatattcatataatgggatatgattcagctataaaaagaaacgaatgatatatggtacagtataaacgtaccttgaaagcatgtagaataaacatgaaaacatgtataacatagatgtaccttgaaaacatgctaagtgaaagaaggcaatatactgtatggttcctttttttttttttttgagagggagtctcgctctgttgcccaggctgaagtgcagtggcatgatctcagctcactgcaacctctgcctcccaggttcaagctattctcgtgcctgagcctcctgagtagctgggattacaggtgcccactgtcgtgcccagctaattcttttgcatttttagtagagacagggtttcaccatgttggtcaggctggttttgaactcctgacctcaagtgatccacctgccttggacttccaaagtgctgggattacaggtttgagccactgcacctggcctgtatggttccatttatatgaaatacccagaataggcaaatctgtggagacagaaagcagatgagtagctggggcagagcataggatttctatttggggtgatgaaaatgttctggaactagatactggtggtggttgcacaacttcatgattgtctgagatgtcactgaattgcatactttaaaatcagttcaacagtaaattttatgttatttgtatgatgctgcaatttaaaaaaaataaatatttcgacatgacgttttttccaagtttaccttagttgtaattttgccaaaatactttcttaaaccattttattgtaattttaggctaagatcatttgcactttatatatagttgaatgaaatatatcgtagttgttttattctcttgtaaatctagaaaagatgaaaaatgaaagccatgagagttttaagtatgtctttgccttgtgcagatattctcaaagggtattgtggagcccttggggctccttatgaccttttcaaagggtctgcaggttcaggttattttcatagtaattgttgagagttatttgcttttcaaatttttatttatttatttatttagagacggggctttgctctgtccccagcctgcagtgcagtggtgcaatgacagctcactgcagcctcgacttctgggcacaagtgatcctcctgcctctcagcctcccaactgggactgcagggaggcattgttttacatttacatgccaccatgcccgctagtttttttatttttcatagagatggggttttgccacatgttgcccaggctgatcttgaactcctgggcttaagtgatccacccccatctcggcctcccaaattctgagattacagaatttgtaagcataagccaccacacccagcctatttgctttttttttttttaaactctttttctccacaggtgtaaagtgtagttttccaaacgctctataatatatgatggtgtagtctctttgttggctaatggtctatgtacttgtatatgtctggatttttttgttttttttttacaattctctaaggtaagctctttgtgatcctcaataatttttaagtgtataaaagagtcctgaggccaaaaagtttgagaacaaaatgtcttggtaaaaaatgtatgtgccaataatgaaaaagcatatacgaactacttgtattatatatttttgaaaacagaaggaaaataaattgtaagccaaatgactcttttggctgcttagcttttatcatctttactgcttcagaggttactagatttggaaccaaagtgtactttttgggatgcggtaggtttctggttttaaaaaaggatgtctggtattgattaaatctatagttttgaactttctaatccagcagctctgtggagtaggtactgatacttggattttataaccagggcacaaaatggttaagtaacttatctgtggtccgacggctagtaagtggcaggtctggtgtttggatccatgaagtctgtttcctgagtctgcactgttcacagtatgcgatctatgtaataccgctccttatgtacattgtataataatagctccctgggaatgtatgtgtgaagttcccatttggaaggctggcatcgtagtactgcactgatagtggtggcagtgattgtgaggtgggttgggttctggtgcctatggcaggggctccagcaagcagatggttagaagacagatagggagcaaggataggaggatgggctgctataggggccagacctcctgcccaggatatttctggtccagttcgaaagttggacctttccttcctagagattggctccacttatggctttataataggacctcttccccttctggagtcctttggagcaagatgcattttcacagttttctcccaacctctttacttgagtctagcacttactgcctttgaacttctctgagggtttttactaccaactagaaatgaaagaaaaagttgaagagggagatggtattcaaaagataagtgatacaaattggagtcttttaggattcatattattgaaacgcaatttgtcaacctccctaagagggtcacatcactgtggtgtgggcccccccaaggcatgtcatcactgaggttaggatgggctctctgccatgaggagtaagccagtgcctccagctactggctagaaacagggagtgttgtcaggagatctgcactggggctgaaggacatccccgcctacttcccttttgctcttcttactatcagtctttactaccgcagatccctttctagggtccacgacctttgctggggtaaagtgggatgcagggatggggcctggggatgctctaggcagtttgcatgaaggagtggctccattggtgttaaagattaggccttctgatactttcttctccacttgtactttgagttaaaggctcttacctcaagagattttctttactctgtggccatatctgtaactgtccttaactctctgtgcatggcagccccaaaccttcccagtggaacagtgcaagctcagagccttgcaggtcagtgaccccacacttggcacaggaattccagggaaaagtgtgaaagggcagtaggtggctcctccgtcctgcttctttgaaaacctctgacctaaaaggtttttgaagctgaatatttaaagaaaatatgtatgagattgtagagatagatgcctaggcggctgaaggggatgtggcaagtggatggcctccctcagggctcctttccacctgtggtggccacaggttcaagactcctgtccaaacattctggtttgtttatgtgttccagaaacagacagagaagaaggtattgtattttttgagacagtcttgctctgttgcccaggctggagtgcaatggtgcgatctctgctcactgcaggctccgcctcctgggttcaagcgattctcctgtctcagccacctgagtagctgggattacaggtgtgcgccactatgcctggctaatttttgtatttttagtagagatggggtttcaccacattggccaggctggtcttgaactcttggcctcaagtgatccacccgtcttggcctcccaaagtgctgagattataggtgtgagccaccatgcctggcccaaactggtattatatctgcatgaaaaagggtcactgtgccaatacttttttcatttaagtttttttttttttttgagacggagtctcgctctgtcacccaggctggagtgtcgtggtgcgatctcggctcactgcaacctccgcctcccgggttcaagcaattctcctgcctcagccgcccgattagctggaattacaggcatgcgccaccaagcccagctaatttatttgtatttttagtagacatgggggtttcactatattggccaggttggtcttgaactcctgaccttgtgatccacccaccttgacctcccaaagtgctgggattacaggcgtgagccaccgctctcggccctcatttaagttttaatatgtttgtgggtagaaaacgtcttaattttttttttttaatctcagaaaatgacatgtgttggtgttgagatctctcttgagtggcttcatcatttgttcgtatgcccaatgtagaaccttattctttatcctgaattccttcctcccccttacacctgatttaattgtgcactattgatctggcttagttctggaacttctctcactctcactcaggtgttgccctagactcataggtgctctctctccagccagttttgacctctccatatctttttccattagagcagtagttgtcaaactttttgattaaaactgagaggccaggtgccgtggctcatgcctgtaataccaacagtttgagaagcccaggtggtaggatcacttgagcccaggaccagcttggacaacatagtgagaccttgcctctaccaaaaagtaaaaaaattagccaggggtggtgacatgtgcctgtggttccagctatgtgggaggctgaggtgaaagcattgcttcagcccaggagttggaggctggattgagtcgtgattatgtcatgacactctagcctggattacagagcaagacactgtcccagaaaacaaaacaaaacaaaatctgagaaattacttattccctaatttatgatttggttattaacttatttaaaatgaaaaataaacccatgtaaagttagtatacatagctttttaatgaaaatcgctttttttttttcccaaaacaacaacataaaatgtagtcggaagagtggccatcgttcacttatgtgttgcagacctccttaatgtctgcctggatggaagagtttctcatccagtgcatacatgcatgaatcattgcagccaggtctcaaccctgtcagacaacactctctttttgtagtaagtctttggtaatgcttcttttattcttaagaaatgtattcatctcagaattcaaatgaaagtaacatactaacatgataatagttcagtgtgtcagtgttgtctcagctacactaggatcacatgctcactaggtcaggtgcactgagaatgcagtggctgcaaatgcacacggtagaggtacattacttggtgattcaaatatcaagaagggcattagatgtaatgacatgttctctaaaactgtgagcaacttttggtaaaatacaaaacagtcttttgatttatgtggtaattatattcctagcaaattgaatgtgtagtgaaacttggaaaaagtcttttgtgattctgtgtgaaatggaatttggttttaggttccgataattatacatggggttttcccctacattactatctagagaaacattcaaaagtcgtatgggacaattcctcatatgggactgttctgcacaacctgttaaataaatgccagtggtgcctcccagcgaatgagaccaccaaaaataccccacggattttcacacatccattagggaatggtacatacctattaagaacactgataagtggaatcttggctgtattttttttcttgttttttgtttgtttgtttgttttgagacagagtttcaatcttgtcacccaggctggattgcagtggtgatcttgactcaccgcaacccccgcctcccggattcaagtgattcttctgcctcagcctccggagtagctgggattacaggcgccggccaccacgcccgactaattttgtatttttagtagacacgggtttcaccgcgttggtcaggctggtcttgacctcctgacctcagtgctgggattacaggtgtgagccgctgtgcccggcctgttttgtttttttaagttggatgataatttaaaaaataacttacaatacagcctgaccaacatggtgaaaccccatctctactaaaaatacaaaaattagcaggcatggtggcgcacgcctgtaatccgagctactcaggaggctgaggcaggagaattgcttgagtgaggttgcagtgagctgagattgcgccattgcactccagtctgggcgacaaagcgagactccgtctcaaataaataaataaataaataaataacttacaataataattacttgaatctcaccgttaatcagtgttaatattttgttgtatatccatcttgtccttttttgtacatttgtagtttttttccattcaaaaatgggatcatttaaaaatttaaaaagagtcgatgtcttggctgggcacagtgactcaacgcctgtaattcccagcactttgggaggccgaggtgggcagatcacctgaggttgggagttcaagaccagcctgaccaacatggagaaactccgtctctactaaaaatacaaaattagccagcgtggtggtgcatgcctgtaatcccagctactcgggaggctgaggcaggagaatcgcttgaacctgggagacggaggttacggtgagctgggcaacaagagcgaaactctgtctaaaaaaaaaaaaagaattgatgtcttgatgctacttaattttatctaattcacgtgtttttaaaaatcataacaaaatcagttttattcttcattctatcatacaattagtacaatctcaggtaagatgcaaacaatgtatactcataagtctctttttaacatgaaaactggtgctacctagggaagtacaaatgaaaccacaatgaggtaccacctccaacatgttaggatggccattataaaaaaagactgaaataataagaattggccaggatatgaagaaaagggaacgcttgtacactgttggtgggaatgtaaattgatatgaagcagttatggaaaacaatatggaaattcctcagaacattaaaaatagaactactgtatgacccagcaatccctatacccaaaggaaatgaaatcagcatcttgggaagatatctgcactcccatgttccttgtggcattattcccaatagacaagatatggaaacgattttttttttttttttgagacggagtctccttctgtcgccaggctggagtgcggtggcgcaaactcggctcactgcaacctccgcctcccgggttcaagcaatttttctgcctcaggcacccgagtagctgggactacaggtgcgtgccaccacgccctgctaatttttgtatttttcgtagagatagggtttcaccatgttggccaggatggtctcgatctcttgacctcgtgatccacctgcctcggcctccaaagtggtaggattacgggcgggaggcaccacgcctggcggaaacgatttaataagtgtctgttgccagacaaaaaaaataaattggggcatatacatccagtggaatagccattaaaaaggtgatcctgtcatttgtgacaacatagatgaacctggagagcatgctgctaagtgaaataaactagaaaaagaaaagaaaaatattgcaagatctcacttatatgtggaatctgaaataaagctgaatatgtaagaatagagtggctgagtggttatcgggggaaggggaagtgggagatgtaggtcaaagttgcagttacataggatgaataaaactagagatctaatatttagcatgatgactctggctaatattgtattggaaaatttgctgagagtagatttcaggtactcttaacacacacacgtagctatgtgaggagatggatgtattacttctgactgtagtagccatttcactgtgtatatgtataacaaaacatcgtgtcatgtaccttaaattatacaataaacaaagaagaggtgccggtttgaaggggcgaggacagagcgtggacttgcggaaagttaggtggccttggtgatttaatctctcaaaccttcggttttcttatctgtaacacgtattagagaaactgtgtcttgtcggaacctacccctcagtgggggtaatcccagctgtttgtcctcagctcatttctaactgaactgcaggcttctcaagagcagccaggatgtcaccttttcatcacctagcaccagctcaggacctggctcattaatttattgaacaaatgaatgtggcagaaaatttgctattggtgttggactgtgtttaaactttgtttcatgtttatcatggttaaacctccatcagaggtaaacaactatgttaattattacatcaaacttctgtacatcttgccccaaatgggatcatttatttgttcaggataaaatgtttttgaagtttttagcacacctgatagttgtatttcttctagattgggcttggatattgttattactcaggaatctggttgaatgtttgattgtataactctgcctttgacatatgtaattaaatgagtttgtatttaatgtgttccttgaggcagccaggtgtatttacctcagaactgttgaaggcttgccatgtctctaggactcattggtacctttaaggcatctctacaggtatgattttcttttactgtggattctttttttctttcaaaagtttttcagctgttagatatttagcagctcagtctgtttgaatgatttaatgtgttactattgaaaattactttgaaatacaatttgactgttttcaagagagtttggattctgaaggcccacagcgtataggctgaaacagtggttctcaaatctagcatgcattcactggatctgggacaggatccaacagtttgcatttctaacaagttccccattaatgctggtgctgttggtgtggggaccagactttgagaactattgggctaaagtgtggaagacaattaaaaataataatatggaggggaaatggggcccagtgtgtttgggaacaggatccctttgtgctctccacagacaatagagcagtaaagaaaaactggttttggcacctgaaaagaaggaaaatagacataaactttagaaaatactgtttgatagttgcagtggtccttaaaattaagataggagaagagatttggaaataatttaattttaaaaagtttattttaccttttttattataggagtaatgcatgttcataatggaaagtgtcataaatacagaaacatttctattctaaaagagaggaaaaatttccccaaagtatcttctgacatttttggcaatgtccattcagtatctcttttatgtgtaggacttttgtttttgttttgccatgaaataaagtttttattgtcaaaataatatatgctcattataatgaaagaaaaagaaagatcataaaggacactcactctttccagaaacaatactgataacatactgaagtttattatttggtatctcttcatgtgaatatatccatttatgtgaattaccttgaccatatggttttataacctaattttttcagtcactatcttttcatatcattagatgtaattctgaagcatcttttttaggcgcagagtatcttactctgaaaaactttgttgtagctgatgctcttcatccactggcccctcccatttctcatttctctactaggaatttgtaggtcaaagagcatgtaaaaatcttgatatgggccgggcacggtggctcaagcctgtaatcccagcactttgggaggctgagacagggggatcatgaggtcaggagaccgagaccgtcctagccaacacggtgaaaccctgtctctattaaaaaaaaatacaaaaaattagccaggtgcagtggcgggtgcttgtagtcccagctacttgggaggctgaggtgggagaatgacttgaacccgggacggggagcttacagtgagccgaggttgcgccactgcactccagcctgggcgacagagcgagactctgtctcaaaaaataaaaaataaagaataaatcttgatatgtattaccagatacccacaaagggcatagaagtttctgttctcactagtagctgtgtgcctgtacccagaccccaagtctatgctcattgccggtttaataattgccagcctgataggtgaaaatagtatcttttcattcacttcttttactgataagaagcttaacacttttcttcatgtgtcagttggtcgtttaaatttcttttgaatttctgctcttgtccttgtcacattttcttttggggttaatcttttttcttgatttatatgaactcttcatacttagggacattaattccttacatcatatgcttcagatatttgtttccaaaatttcatttgcttttaaaactaacttgtggaattttttttctttcatagaagtgttttaagtgtttcatagaagtgccatccactatgattttccttttttttgtttttttttttgtttgacatggagttttgctgttgttgcccaggctggagtgcagtggcacgatctcggctcactgcaacctctgcctcctgggttcaagcgattcctgctaatttttgtatttttagtagaaacggggtttcaccacgttggtcaggctggtttcaaactcctgaccttaggtgatccctccgcttcggcctcccagagtgctaggattacacgcatgagccattgcgcctgtcctgattttccatttttaaggatttctgctcatggtgtcaaatgagaacatcccctgtcacttcaagattttacgaatattaacctgcattttcttctacaacactttctcttttttaaaaaacgtttttaaaggtggagttttgctaagttgcccaggctggtcttcaactcctgggctcaagcaaacctcccacctcagcctttcaaagcgctgggattataggcatgagccaccgtgcccagcctctgccacacttccatgatttcatttgttcactagggtcttcaaactgtctgtagtttgttttgatgcaagcaaatacatttattttagtgtggccaaatgtaatttacatttttaaatattgaattattttggttgcactgtgcaaacattaggcaaatttaggtataaagttggaaaaagccactaagtgtcacactgttctgaggagcactgggaattctgagaaggcttaaagagtttgccatggttttctgtccttgtgatagtttgttcggaatgatggtttccagcttcatccatgcccctacaaaggatgtgaactcatccttttctatggctgcatagtatttcatggtgtatatgtgccacattttcgacagaaaaccaaacactgcatgttctcactcataggtgggaattgaacaatgagaacacttggacacagggtggggaacatcacacaccgggacctgtcgtgaggtgcggggaggggggagggatagcattaggagataaacctaatgtaaatgacaaattaatgggtgcagcacaccaacatggcacatgtatacatatgtaacaaaacctgcacgttgtgcacatgtaccctagaacttaaagtataattaaaaaaaaagagtttgccatggaagtggaggtcaggagaggggagaactgagcaagtatgtgggtatttccagctcctacttctcccaagaactgcaggcttagatgggcagctgtctagtaggcagatcttcttgggcatctaataataagctgttcaaaattaacatagccaaagcagaattcttttttttttttttttaagacagagtctcacttatcacctaggctggagtgcagtggcatgatctcggctcactgcaagcctcgcctccctggttcaagggattttcttgcctcaacctcccgagtacctgggattacagttgtgtgccaccatgtccagctaatttttatatttttagtagagacagggtttcgccctgttggccaggctggtcccaaacatctggcatcaagtgatccacccgcctaggcctcccaaagtgctgggattacagacttgagccaccgcacccagcccaaaacggaattcttgatgctgtccccaccctaatgcgcacaccccagtcctttctcgtcttagtaaatagcgctgtcaaacacccatttaggcaggccagaaacttcaaaggtgtctttgattccgctcttccaccactttatatctactccatcatgaagtcttgtagactttctgtccagaatatatcctgagtctgaccactcctaatcatttccactgttaaaacattaggccaccactgtctctcatgtgggtgttattgtggtcttctggacgttgtcttggttccactttgtctctccctgtaatctgtttcacatagtagcttctacagtgtaaataagatcatattattcccttgattaaaacctttcaaagacttcccattacatttaaaataaaatccaagccttactataaaagatccacttgtctggcctctgtgcttctccagtttcttccttctgcactccccttgtctgctttgcggtagcctaacatgtctctttctatctcttgaacaggttcttttctttcgttgggtctttatacaggctgaacctcctctagaactaactagaagctacctctgatgtcttctcagagagactttccttgactatccccaggcacatgaagaagccccacacaccccctctagtcaccatctatcttgttaaccttacttattttcttaaagtggggttctgtatgtaaaatgatcttctttatttgtttactggtttattagctgtcttcctattcgagaatgtaagctcccagaggacactctgttttgttcacttctgaatccctagcacttagccccgtgcttggcccatgacatttgtggtaagtactaggtgaccatttttggaactgttcccaccccacggcctgcattcacactttaatcacagcagctcagcttttatatcgtgagcttcagtgggaggttttgtttacagaaagttttcttggttgacaaaagcctgaagatgattttcttggaagatgaggatttattctaaggatatgtgaggaagcaaagtttttgttgttgttgttgttttggaggggtggtgggggatccgagtctcgctttgtcatccaggctggagtgtagtggcgcaatcatggctcactgcaacctctgcctcccgggtttaagcgattctcctgcctcagccacctgagtagctgggattacaggcatgcgccaccacgcccagctaatttttgtatttttagtagagacagggtttcacggaagcagagattttctgtcagtgttccatctacttcataatgtattgttgatatggttcttgattttttaacctgaaggcataagcatgaaaatagcataatgatttttcacagttcctgtccaagagtactttttctttacatgttgaattacctaccatagattgttttatcctataattagaaagattatgagattacatcatcttatatttacccttaaagagtgtttcccgaatcataagccaaagcctttgtataaccttattatgtaaatatttatgtttcaggtgtgttattccctttgtgtgtgtgtgtatctatatacatatatatgcatagtatttgtgttctcttattcctatgacattgtaaacgttctagttgatgatgtctgtgcttccattgcaactcttcactgcatgggtactctgatgtgtatggcttgctgctccccagatattcgttgactttgtgacatctgtcctaggacaatttcactattttagtttttggctactcagttaattagaaatgcatctcagttgtattttaagttattgctttctacattttaatcagtaaatacaaagagattgcctttagtttttgttatgtgtattttcaggttatgttactgggagtacaaagttttacaattgttgctttctttgtggattataggttttaggaaaataaaatttatcgtattgacagtttttgccttgaaaggcttattaaatttagcagtcctcccttttttgtgtgttttttgatccttatcctttttttttttttttttttttttgagacggagtctcgctctgtcacacaggctggagtgcagtggcagagctcactgcaagctccgcctcccaggttcatgccattctcctgcctcagcctcccaagtagctgggactacaggtgcccgcccccacatccagctaatttttttgtatttttagtagagacgaggtttcaccgtgttagccaggatggtcttgatctcctgacctcgtgatccgcctgtctggtcctcccaaagtgctgggattacaggcgtgagacaccgcgcccagcccatccttttgtttttaatctgtcattttattttaggtgcatttctagttcgcttggcctgctgtctttttcataacactttattcctatgtaatagatataatgttcttttgcattttattgtttctaaagcaaatatcttctaattaagaaaaataacttctagttaatttatttcaaggggaagcagtgggggttttattcctctggatgtttgttgtcttgtgtcctgtggaatattttctttctgtttttgttcttttctttctctaactcaggacagtgctgaggaatgttttcattggtgccgtattttctttttctttcttttcttttttcttttttttttttttgagacagggtctctgtctgttgcccaagctggaatgcaatggcgcaatctcggctcactgcaacttctgcctgctgggttcaagcgattctcatgcctcagcctctcgagtagctggcattacaggcatgcaccaccacacccggctaatttttgtgtttttatagagaaagggtttcgccatgttggccaggctggtcttgaactcctgacctcaagtgatccacccacctcagcctcccaaagtgctgggattgcaggcgtgagccgatgtgcgtggcctggtgccatactttctgcatttttctttaaggaaggttccaaatgtctgaagtccaccaaatgtctgaagtcctgcccagacttttggagagaaaacacagcaaagcaatcagtaggttaatgactgcatggtttctggaccaaattatcctcatctaccacttagaacattaagttgtaaaccagagtcagcacagccagggtggagattacttatttgtatcccttgctcgtaggttatttaatattctctgttgtgtcaaagtttagtcgggtatattaattagtcagcttttgctaaattatgttgtggtaacaatctccaaatctcagtagtttacgacaacaaaactttgtttctcagtttaaggctctttgtgggcttcatgccatggtagaacctcaaaagtggcatgtgccatttcaactcatacttcattggccaaaagcaagtcacgtggtcatgcagggcctcagtaagcaagaaatatttacccgcccggggatggacaggtaggaaagggtctgttaaggaagggcagcaaatatttggataacagtactatgtgtttgtatggagcgatatttaagaaggtttcctaggttttttgaggggtattgaagctgagaggttgggggcaggcaggaagctctgcagcctgtagcctatggtatcaagcttcatgagaacgagaattaactagttacatctttattaccatttttggcatctctgcagacagtggatctaatgcatgatagctgattaataaatgtttgttgaattaatgaacaaaatagcaagaaagtaacgtattctgaggcaggagaattgcttgaaccaggaggcagaggttgcagtgagctgacatcatgccattgcactccagcctgggcgacagagtgagactccgtctcaaaaaacaaaagaaagtaaacagattattttcatgctatttgatgcctccgcttagtttggaaccagtttttattttattttattttattttattttattttattttattttttgttttgtttttgttttcgtgttttttgagacggagtctcgctctgtcgcccaggctggagtgcagtggcgagatctgggttcattgcaagctccgcctcccgggttcacgtcattctcctgcctcagcctcctgagtagctgggactacaggcgcccaccactatgcccggctaatttttttgtatttttagtagaggggtttcaccgtgttaaccagggtggtcttgatctcctgacctcgtgatccacccgtctcggcctcccaaagtgctgggattacaggcatgaaccaccgcgcctggccttggaaccagttttatagagcagttcctacaatagctccttttatatttaaaatgaaaagtgctttcttgggggtcattttgccataccaaaagattatgtgcttaaaaaaaaaactacatactaattacagaaaaaattttaaatatgcattaaatacaagcaagtagaggttgtgttctatttggctactcaggacaactattggtgttttgttatatatcctcctatataattcctttctttcttttcttttttttttttttgagatggagtttcactcttgttgcccaggctggagtgcaatggcgcaatctcagctcaccgcaacctctgcctcccaggttcaagcgattctcgcttctcagcctccctagtagctgggattacaggcatgcgccaccacgcccggctaattttgtatttttggtagaggcggggtttctccatgttggtcaggctggtctcgaactcccgacctcaggtgatccacccgcctcggcctcccaaagtgcaggggttacaggcatgagccacatagtgcccagcctctttcttttcttttctttctttttttgagatggagcctctctctgttgcccaggctggaagaatacagtggcaccatcttggctcactgtaacctctgcttcccgggtacaagtgatgcttgtgtgtcagcctcccagtagctggcactacaggtgtgcaccaccacacccagctaatttttgtatttttagtagagacggggtttcatcacattggccaggctgatctcctgacctcaggtgatccactcacctcggctgcccaaagtgctgggattgcaggcttgagcccttttttttttccccatatggcttctgaacattgtttatatttattgtcacactaggatcacttagttttgtacttttagtagtatctattgctttatttgttatgttgccaatcggcagttgtaaaggtcgtagatgaaatagacaagtatttataagattaattttatcttacccttgttctctttttctcttcttgaatttcctccttcaaatatatgaactatttacttaaccaaacactctctttctcttccctctcaccatggcaagagtgaaagggaccagaatgatgaaaggtagacagttggcctgaggaaataaggtgccttggcgattctcagactggataatcagctcctggggaatcaggcgctgacttttttttttttcctcctgcttttactcagagatcatcttttcatattttgggatttgtgcagtcatttcaatgatctaaaagtgaagagcttgataataagttgattttagtcctactgtctttttgtgacggatgtgctagataagcttaatgtgagtcattcaagaaccaagcccctgtttgaacctgtccattgagggccctgtttatcagaggttgaagcattttttagctagcagctgatcttgggtaagcaagccattgtacaagttccccatgcctagttgttttgcatcattaatcatcttttcttcaagccatggaaacatggctgagtcttgagtcatctggctcttcccagtgctggaaatccaccctgctgaggtgaatgtgtgaaatattttttgttctcggtagagatctgagaactggtttgtctcctgcaatgaacagattgaattccttataaatatgttactaaaaggtaccttttgtgtccattttacagatatctgacatgattatttattaaactcctttaaataactcctgtgcttaatgcagtttccaaatatttgaaatactaaatgtagatttagggaactcagtgaccagttttcatttgcattttgatgaatttctctattttaatatttgtagttgctatccattttagaaatatccactctgccaagtaggttgggaatgtgtgcaagaatgacagcttaaataatgtgcttgtttgctattggagccgatgcccctaagtaaagctaccagataaagagaggaaagggggaaaaaaggaggagaatgaagccaccgtgtaacatctgttagagactcaatgtgagccctgtgagttagtcttcatttcccatgctatgttttatttttatttttcctgttccattaaagcatttcggttaattctgtataagtagaatgctgataactccttagagaaatgtgattcagtaataaccttgtttccatgtgactacttatctaatctgccatgcatctgctttaaggaaggtgtccattagggtcaactcacaggtcagacattaatcttaattgtcaaatgtctcaactcattgctagagactaaattgatcttgatggcactcatctgagtaccgattcacactaaaagacagtcaaggggttgttttcctttgtgtgttgtaattcttagcaggatcctaaaaatgaaagttttaaaatgtggaatagcatgattaatgaggacatttattaaggttaaggcagtttaaaagttcagtttaatctaaggttagcttgtaggaactgatataagagatagttaaaaatttgttaagctttacttaaaacctgtatttgggggtagaaacagttttcctagggtacttataatttcctttaattatctcagaaagagggtctcttattaggatgagggaaaaaaatgacccgtcattcttttaaatcaggtttaatttattcctgatatttatatgattcttatatgtcatgtaattcttatgacatataagagagaaaacattaatctagagtaggtaatttcctagttcagcttcttccacttgtgtgaactacagaagaactgaagagtaattgtaattgttttataactttaaagaatttaagagattaaattgctgtccttgtgaattctttgttaagtaactctcaaagaaatagtcaagttaaaggggatttactttctaaaactagctttcttttctttctgtctaaccttttattatgaaaaatttcaacatctacaaaagaaaggagagtagtatcattacccagctacagtcactgttaactctcagctaatcttgtctccatcctgccaccctccactccagattattttgaagcaaattctagacatcacttccttttattaaagcaagttgcgtttcatagtgacaatagaaaccatttactcttggcacaggtgctaaggtctgaatacaactttaaggagacagtgtctgcattgaagagcttatgttttaagaaaggagtttatgttttcactggatatactcggcgttcagggaatcagagactttcttcaagtttcccttgtcttttaaatagggacgtatttgcaagttcttatctgtttggaaattcctgtagcaagttcaggtttagtcattctgtactgctttggtggtgccttatctaaatagtattgaaaggaagaaagaattatttcaccaagagttggccttgaaaggagttagatgtattgggtatatttaggaagtaccccttcaacgctgtaataatataccaacttttaaagctacctcataatagctcttaaaaacacatttaaaacacttagaggtgatcctttttcctagccatcagtgggacaaattaattcctttttgagtaaaaaaaaaaaaaaaaaaaaaattctctttttttagtactcaagatcagcaagtattggttgactcattctttgttgttaaacctcttggtttctcaggccagtgtgtctttttgtatactttgaccttgcactttaaactgaattccttttgtcctttgagggaggcataaagctgtcagttcctgttggtgagtgtgggaaattgagttttcactcttctctataatttctgcatttcaagtggttttaataataatcataactatttctcaattttacttcttaaaaaagtagattcatcagactgaattgaatatttgttttccttctaaagctgaagccaattttgccatacttgtttgtgcattcttaagagtttagtacttaagcatagaaaactgtggggttcacatttatattttgctttattacaacttagaaggtaattgatgacttggctctgtggtatgctcaaagtgctggactgagctagttcaagaatgtcattagcagtgaatgggaaatatgtgtctacttttcttcagtagctaaacagaagtaattatatatttacattctacctatttcatagggatgttgttagaattactgtgattagatttttttttttaatttccaaatgtatttaagcttctttacagataggtgccatatcaaagcaaggtgttaatgtcatttttctcaatttgtgtttttgtcactagaaatatatatatattgctttttctcttttcctggtatatttttctgataaatgttttgaaatttgttatcttaagtttttcatagctggaatgctagaaaagcatttatgtcctatttttagtgcaagtgatgagtctggctgggtgggtaagttaatggcaaggtaattgaactgtgctgagtgctcgccgatgtatccttctggcctctccattttcagggtagagttactgtttacagtgacatgtttcacagtctgtgtgaccagccagtgtgaatcagttcgtctattgcctggctttcttgagctcaatttttgtctcatttcccctttccattttatatatcacatttcaagatggatgatctacttgtctaaccactccagggaagattggtgccatctaataaagtcaaaatgaggtcctgcatgttacctggcataaattagagaattatagaatgaatgtgtgaacagatctgagactagagctaggtcacgaaactcctcagtttttttgggttctcattatgtgtttatggatggaattgttctctttatctggtttgggtggttttgtttgtcagtggccaatgtggtggatatttcaacacaatttggacatgcttcctatatattttgcagaatggtctttttcttttggttaactttataactaatagttaaagaattttcaagcctcagctgggtacggtggcccatgcctgtaatcccagcactttgggaggccaaggtgggcagattacctgaggtcaggagttttgagaccagcctggccaaaatggtgaaaccctgtctttactaaaaatacaaaaattagtcaggcctcactccagcctgggtgacagagcgagactctgtctcaaaagaaaaaaaaaaaaattatttgggcttggtgacgtgcacctgtaatctcagctactcgggaggctgtggcacgagaattgcttgaacctgtgaggcagaggttgcagtgagccaagatcgtgccattgcacttcagcctgggcaacaagagcagaactccatcttaaaaaaaaaaaaaaaaaaaaaaaaaaaaaagaattttcaagccacattaggatgcttatcggcatgagttttacataataagacaatctgaaatgtatttgagttttgatgtttctaatctgtagaacttgaaggcctaaggattttgtagttttttagggaacagcattcctctttctctcaggtgatctatgttatgttgacctactcaaacatgttaactttgaaaatgaaccaacgttcaggaacaaatgaaatgacattttcaggacagcattccaaatacatagttagggacagttgttcgtagcttctggagtgtttgaaaatggccctcatatcatacaacttgaattggcattcattgacaatcactttgcttttaaaagatgcttaacaaagagttgtaagtaacatactttgagactgagtaaataaaataaacatgcgaacctttgatgttaagctgagtttgtttgatttttcaggctgaatatacaaagactgtttctaggaaaacttgtgctttgtacagatagaggaacctcctaagaattttgattgtggcttccaaaatagcagatttctagaatatgattacctactttatctaagatttcaaaaagctgctttgtctattttatgatataaagttttcaaaaaatcatcactgttttgtttgccttttttttttttcttgaaaaggcatgtgtttaagcatcagccttattagctggactgttatttcatgtatttctgttagaacgctggataatggacttgaaacttacatggctaatataataccatgaagtttaggaaactaagggctcatttctgttgtattccttggaacgtatgtgggttcaagatcaaaatcattatttcttctttgttttggtatttgtctctttcgggaattaaaatttgttcccaaacattcgtaggactacactgtagcaggaatctgaatagaaaacactccttgtttagttctgagtttatgtggatgaggactaagtgaccattgaaggtggaagggtgatcacagagattactcagaacttaatttattaattctaaaatgcgttcattgaatacacatggtttgtgtgctttttatgggccaaaccatgtaacagaggctgggaatgcagttcttgctctcaggggaatgtagtcttgtctgagaaacagacaatgaacatcagtttccaatagatctagttgtaggcttagagcatgcagagggaacaacagaaaaaatccactgagaccattctggggtccaaataggacccatggcccaagtttagaatggcaagaaagaggaaagacagagggagcttgggcagtgttctgcaaaggataaattcagttctctaagaatagttcactagtccttttttttttctttttttttttgagatggagtttcgctcctgtcacccaggctggagtgcagtggtgcagtggtgcagtggcacgatctcggtgcactgcaccctctgcctcccaggttcaagcaattctcctgtcttagcctcctgagtcactggaattacaagcacgcccggctaattttggtatttttagtagagatggggtttcaccgtcttggctaggctggtcttgaacacctgacctcaggtgatccacccacctcggcctcccaaagtgctgggattacaggcatgagccattgtgcctggcctggtcacttgctcatagttattaatctgaagaagttctacagtaaatcaaatgttcaggattgcctaatgttgacttactgatttagaatatcattctcttggtatgcttctataaactaccagtgctcaatttttcttttcaattttgaacttgttgatggacagtgtctacagtctcttgacagttatgtaatttgtgtctatttaggtttaagctgtcaccttcccaaatgcggcatctgtgtagccccagagggagcattctaaaaggtaaatctgagcctggcgcagtggcccaggcctgtaatcccagcactttttgggagctgaggtgggaggatcacttgagtccaggagttttagaccagcctggtagcaagaccctgtctctacaaaaaataacaataaataaaattaacaggcacagtgatgtatacctctagtcctagctaccgtagaggctaacatgggaggattgcttgcactcaggagttcgaggctacagtgagctatgatcgcaccactgtactccagcctggtagcaagggcctatctctaaagaataaaaaatagactaggcatggtggctcatgcctgtaatgctagcactcggggaggctgaggccggtggatcacctgaggtcaggagttcaagaccaacctggccaacatagtgaaaccctgtctctactgaaaatacaaaagttagccgggcatggtggcgcacgcctgtaatcccagctactcaggaggctgaggcaggagaatcgcttgaaatcgggaggtggaggttgcagtgagctgagattgcaccactgcattccagcatgggcgacagaccaagactctgtctcaaaaaaaaaaaaaaataattaaaaaaaaaaataaggccgggtgcagtggctcacacttgtaatcctagcactttgggaggccaaggcaggcgaatcacttgaggtcaggagtttgagaccagcctggccaacatagtgaaacctcatctctaccaaaaatactagcctggcgtggtggtgcatgcctgtagtcccagctattcaggaggctgaggcaggagaattgcttgaacctgggaggtggaggttgtagtgagccaagatcacacttctgcattccagcctgggtgatagagcaagactctgtctcaaaaagaattaaaaataaatgaacaaaaataagccaggcgtggcccggtgcagtggctcaccctgtaatcccagcactttgggaggctgaggcaggaggatcacgaggtcaggagatcgagaccatcctggctaacatggtgaaaccccgtctctactaaaaaatagaaaaaagtagccggtcatggtggcgggtgcctgtagtcccagctactcgagaggctgaggcaggagaatggcgtgaacccgggaggcagagcttgcagtgagccaagatcgcaccactgcactccagcctgggcaacagagcgagactccgtttcaaaaaaaaaaaattagccaggcatggtggtggatgcctgtaatcttagctactggggaagttgaggcaggagaatgacttgcactggggaggtggaggttgcagtgagctgagattgcaccattgcactccagcctgggcaacagagcaaggctctgcctcagaaaaaaaaaagtgtatatatatatatacatatatatatatatatatatatatgtatatatatatatatatatatatgtaaaagttaaaaaaaaaaaaaaaaagacccatttctgccgaaaatctttcagtgactccatcaccccaatgggccatgggcaagtcctgtttccactctcacatccttgcctttgggattgttttcattcctgctgagtatttaccctcacctggaaagcagctgtgtgaacttctcttcatccttcgtaggctggtggcctttcttccatgctcagttaatcagtttctcttctctgcttcctttgttctttggcctgctctgcggtgttgtatgaaacacactgtgccagaattgtttgtttactttctgttcctgttctaaatatgagctctttgaggcaggacctgtgtctttctttggacctttacgtttgtcgcagtaactgtcatataataaacagtcaatacttgatttaagctgagcaatgtaacacttaaacattaattttgttacatttactggattataatggtgactgaaaaaaacatttttaagttttttactccacctgggacaattctaactaagtgttttacttatgttaaaactcatttaattatctttgttaaagaattactctgatgcttgttaaaatagttaggaagactttattcaagactattgcaatggcggggagagatccagctcaattctgaatccagcaaggacaaatagagaattacagtcaagtagcagaatatggtcagtgaatggtaaattgctaagtggagacatcaaggtcagtagatcttataaaactggcttagtctgcttgggctactgtaacaaactactatagactagatgccttaagcaatcgaaatttatttcttatagttctggaggctaagtctcagatcaagatgccgacagatttagttcctggtgagggccctctttgtggtgtgcagacagtcaccttcctgctggcagaaggagagatcatctctctgatgtctgttcttataagggtaccaatcccattcatgaaggctccactctcatgattttaattacctcccaaaggctcgctttccaaataccatgaccttggggataagtgcttcagtgtatgtattttgagaggacacatttggtccatggcactgacctaacaagattgttgccgaaggcaggcctagaatgtatacatcaaaggtgggggtgaggaatttgatcaaatatcaaaggtgatcagatatctcagatgggggtgattctcactaaactgacttagcaggattgtttgtaaaactgagttaggtaggctgaagacaggaggggactggaggaggttgcggcttcgttgaggagggctcagagaagcctgagtttggtcaaggagagggtctttgtcactgttaggagccttttaacttaggtgctaattatactagcattttatagacaaagaatctgaagcttagaaagaggctaagcaactcacgaggtccgtaccagtaagcaccctacctggattctagctggcgtgctttctgttccataactttaaagcattgatcatctggaccctgcctgtgatggctcaatttgcttttgctaacctgctgtgagaatcagtgggagtttgcctctgctttaaaattactcatggtcttgctgcccttagtgctgtcaatcctgtgatttccactggagcaacatactcaggttacaacactgggtaacatttacattttagcagctttcttgaaatttaaaatatatgtgtaagtatctcatttatatgcatttctagtttctttatacaacagaataacttcttttacatcaaatttctgaatttgactaaatttagaaataatggaatctcatccattaaatatagtcatagaaggaaggaaatatgaaaattaggatttcagatgtttgaacataaaagataattttaaacattgtcagtaatctatttctttttttttttcgagacggagttttgctctgtcacccaggctggagtgcagtggcacgatcttggcttactgcaccctctgcctcccagttcaagtgattctcctgcctcaacctcctgagtagctgggattacaggggcatgccaacatgccgggctaatttttgcatgccaccatgccaggctgatttttgtatttgtagtggaaatggggtttcgccatattggccaggctggtcttgaactcctgacctcatgtgatccgcccacctcgcctcccgaagtgctgggattataggcatgagccaccgcgcccagcccagtaaaatctatttctatgaaaagctcttcaaatgtaggtgaacgctgtaagctttatgaatcaactgttttctaaatggtaatacatgaaatctgacaattttttatgtgattttattcaattttctaagaaaagtaaaaaatcagatacatagccgctcttctcttgggactagtcttgataccttttgtatttttatatagtgctttgctcatacccttcttgctgttttttgttttgttttgttttgttttgttttttttggtgggggggtgggggatggagttttactcttattgtccaggctggagtgcaatggtgtgatctcggctcactgcaacctccgcctcccaggttcgagcaattctcctgcctcagccttgcaagtagctgggattataggcatgcgccatcacactttgctaattttggtatttttagtggggacagggtttcactatgttggtcaggctggtcttgaactcctgacctcaggtgatctaccctcctcgacctcccacagtgctgggactacaggcgtgagccactgtacccagccccttcttgctatgttttagcctgcaatgctgttcccacttgtgtctatatagcactcctaatttaaatcatacacactgctattctgcagtgatttcttactctttcagtcagggttggtagcttttttctctgggctttcacagtcctgtggaagggcacagggttatcttatctgatacaatgtgtacgaaaggagtaactgtatcatagtaaaagttttatatataagtgaaaatatttacaacactttatccagcttacaagtttttgatatattttgtttctgtgtcttaaacacaatggacaaatacctcatataaagttttatatttttaattgtcatatatttcattatatggatatatcttttttggagacagagtcttgctcttttgctcaggctggagtgcaatagcacgatcgtagctcactgcagcctccaattcctgggctcaagcgatccttccacctcagcctcccaagtagctggaactacaggcatgtgctcccatacctagctaatgttttggtcttatttttgttacttatttatttatttttaaacactttgttgcttaggctagtgtcaaactcctgggctcaaggaatcctcccaaactttggctacccaaagtgctgggattacagatgtgaaccaccatgcctggctggatgtttcataatttacctaactgttcctatgctattgaacagttaagattatttaagtttttaattgttaaaaataaagtcatggtgaatgcctttggacatatatctttgtattttggattattttcttatggcagatttgcaggagttttgttattgggtaaaatggaaagaacatttttcctttattttttaagagaaagggtctggccaggcgctgtggctcacacctgtaatcccagcactttgggaggccgaggcgggcagatcacctgaggtcaggagttcaaaaccagcctggccaacatggcgaaaccccgtctctactaaaaatacaaaaattagccaggcgtggtggtgggtgcctgtaatcccagcgacttgggaggctgacaggagaattacttgaacctgggaggcggagattgcagtgagccgatatcacaccactgcactccagcctgggagacagagcaagagtgtctcaaaaaaaacaaaaaacaaaaaacagacagggtctttcactcaggctgcaatgcagtggtgcaatcatggttctctgcagcctccaactcctaggctccatcaatcctgcctgagcagttcctaggactgcaggtgcgtgccatcatgcccagctgatttctgtatttgttttttttatttgtagagatgaggtcttaccatctttcccagctggtctcagacttctggcctcaagcagtcctcctgccttggcctcccaaaatgctgggattacaggcgtgagccaccgtgcccggccacttttttctactcttgatatacttacctatgatacgctttccaaaggagttgtaacagtttgccctcccaccagtggtgtgagagagggtctctttgctctaacagtattaatatcagatatctgtattaaacttatttattttgaggccttacctctttccttgtggtaaactttctgaactaggttgacctaaagtaaactggtttagattcccaaataaaattgacaaaaactttataagatccattttaaaagttggagtgtcaaggaaataggaaaagctttgttagagagggaaatgttattcagtgaagtacatattgaatgtgtgaacttttcttcagtaacagttgttatcttttaaaaatcttctccatggtatttggaattttaaagcttaatacctctgctggattttgcaagcgtgaaactaaaacacagtgaaatttgaatgtgcaaacatacataaactggaattgtgaataaattagattataaaccaaacacattttgagtataagtgggcctttagaaagttttttatattatgggtagaaggtgaacctttctaaagaaaataagaaattgaggaaatctaggattttcttctttttattttggatctcagtgtgtttgtgatttttaacagaaacgttcttttctgtactttaatggtgcagccagatccatgtaaagaaaaggagtgaaatccccaggaaagatgaccagcagcaggattcttttcagcttttctccctttcctcaggcttgaatatatttcagtgcacctcaatcaagtgaagtgagattaaatatttgagtcatctgtctgttgccttctaaaatggtctggctttctgttggctgcagtctatttagtgttttagtgatgctaatgttattgaatggtttttagttctaaaacttctagtagtgataaatcttgtgcatagaagtcccctaggtcacttagcagagcgcagttggtttttgttaatgactgcattgtcctttgctctcattcgtgatacccagtgacttttcattgatgttgcagtaaggctttttttttgttgttggacttctcccattctttacacattggtaaataatcttcagctgtagcaggaggtagccagcatctatgtgtggatcagatttatcaatatgtacctgtgcagattgcctttatctcctgattgggcaaatacttaacagtccttagcagtctctccattgagttttccaccaactctaactggcaaaaggactcagttgtattggacaggaaaatcttattgtctttgctgtccattgtggcactaaagctgtgaagatgtcatacatgtgaagtattcactggattctcagttacttactcgttatcaaggcttacatgtagccaatttaattttgatgaatatgtttaaatgtagggcattttataattactggctcatggttttttatacagtatgtgcatatttcatttcttttactaccgtctttcagcccatatttaattcatccatttgcagctgttgcactgttttgttgaaactggcttaaaaatctggcaggaggcttccctactttcttgcccttttcggtgttatggtgttattttacacagttagtactttctatgtagtttcttctttcctaaagctgaagggccatatctctcaaacttttctctgcttacctttaaccactgttcgtgccgatgagctgataataccaggcttggttgctggctgtatttagaggtatacaatttaaatacccagagataaaggtgacagtagtaaattagtgcactgtattgtcttaagactaagtgtgatttcagttcttatgctacaacatggaagtttattttaatgttttcctttatgtatgggctttgcaatggttgaaacttgagtttttatttggaagttttggaagacaacttttagattgtctcttttttttttttttgagacggattctcactctgtcgcccaagttggagtgcagaggcgtgatctcggctcactgcaacctctagctcccgagttgaagcgattctcctgcctcagcctcccgaggcatacacgaccacacctggctaatttttttttttttttttttgtatttttagtagagatgggctttcaccatattggcccggctggtctcaaactcctaacctcaggtgatctgcctgcctcggtttcccaaagcactgagattacaggtgtgagccactgtgcctagcctagattatctcttctttagtgactgtatatatctacattacacagatgacaacattttgttttcctgtaacctaggccattacatttttttttcatgtgacaaagtgtttgcaattatttgtgaaattttaattttttcatcacttattaatttatatttgagaggactggaaagtatgtgagttgaaaatagtttaaacttatacaatctcattattaatttggctgttaatttgaatctattccataacttatatttaaaataaaattttgatttgaaaggctcttatctcaatcagtggttcttaaaattattgtttgctgtttagagttatattttttttccaggaagtacttttttagctttcaggaacttgatataatgttttattcttgatgacccactggaaaatagaaccttctagaagaaataaagtcactttattgaagctttatgaatggctctcctatctgcatctgtagggctctacaatctgatttttccaaacaaatagacaaactatggataataacttttcagatgttactttgcagttagttggtggtctggaagaagaaaaaagagcttcaaagaggggactgttaattccatttatctcttgaacaggaattgctttcctgtctttcattgctgtcccttatttttcacctttatgttgtagctaggttttggttttattagctccctgatgaattctctcttcctgccaatattaaagtaaggatgatttagaagaactgaggttaaaatctgcctattgaagctctccaggctagataccctgacatttctctttgtggaaagtaagcaggagtaaagggacaaatcgtccgaaatgccattgagtgttgccaagtgatgtgctgacagctgtacctgacagtgattgctggaccctggtcattcctgagtgtctccttttcacctcccatcccctgctgccactcccccctaacaacaacagaaattctgggaggaatgcctgttccctatttagaggacaacttgagtgatcatgatagtttgtcagatataatgtggacaatgacctttttcagttttagtaataagattcttctttttatcaggttctttatcctttatgcagttttaaaatattacttatgaacaagctgcatatcccttttaggtcatcttgttcttctacttcaaatagcacatgtagaagccacatttgaggctcagggcttcagacatgacaatagggcattgatcaggttggctatatgtttgggatttgtcagttcctttgtccattttttgtctcgctttcagtaccttttctctgtgttttaaaagggctttgtgtacctcttgcctttatgtgtaatcttacagggcagctttcttctttttcattcatttcctgctctaagagtcatctcaagataggaatctggtataagactcacttatagaacagggacataggctcttccagttgttttcattcattgcagattattttaaataagagaaaggtttccttgtatttttctttaatgttttccaattttgaattgttatagatgcaaagcctttaaaaggataatatgtggaggcagtatttgtttggggtatcttttaattgtttttctagatcaaggacagatatagatagattaatacctgaaacgaaaccctaacaactctcaaatatcagataatttttttttatgtttctgaggatgtttttatatcctttgagatatttaaaatatacacatttttatgtttctcccacatttggacatttctttcccctcaatgtttcattgatgccacatttctaccaattttaatcttgtattctatatcttactatcctatagtttcttcaagctgaaattagaccttttgagcaactttaaaacaaatttttaaaaatatttatttataaaagatcaattacacttattaccttagtaccataataaaaatctgtttcaaataaatgagtctgaagatgggaagggacaccattcagtgggtttagaaatagacctgttaaaatacaagtccagctggctgggcacggtgcctcatgcactttgggaggctgaggcgggcagattgcttgtgctcaggagttcaggaccaggctgggcaacatggtgaaaccctgtctctacaaaaatacaaaaattagccaggtgtggtggtacacacctatagtcccagctacttgggagactgaggtaggaggatggcttaagccctggatgtggaggttgtggtgaactgagattgtgccactgctttccagcctgggtgacagagccaggtcctatctcaaaaaattatagaataaataaataagcaagcccaaaggcaatttcattttattttatttagagacagtgtctgactgccgcccaggctgcagtgccagtggtgccatcatagctcactacaacctcgaactcctgggacaaaagcattttttcctgcctcagcctccccaagtagctgggattgtaggcatgtaccacacacccaatttttaagtttgttttttgtagagacagcatcttgctatgttgcccaggctggtcttgaattcctggcctcaagagatcctcctgcctcagcttcccaaagtgctaggagtatcggtgtgagccacctgccctgcttgaattgttttttttttgttgttgttttgtttttttttggagacggagtcttgttctctgttgcccaggctggagtgcagtggcacgatctcagctcactgcaacctaaacctccttgggttcaagcaattctcctgcctcagcctcccgagtagctgggattgcaggtgcccaccaccatgcctggcttatttttgtatttttagtagagatggcattttgccatgttggccaggctggtctcgaactcctaacctcaggtgatccacctgcctcggcttcccaaagtgctgggattacaggtgtgagccaccgcacttggccctgaattgtttaaatatgaagatgaagaggtctctgctgtccttactcctctggcctctaataccttctagccatcttgccttactttggaagggagggagacagatgtagttgttcacagttgagagctgctgaaacactgtgactttatggacagtagtagggagaaagcaagcctaatccgtttataaatgttccattatatacaaaataccctttctaccaacagtaggttcttaattactgacaccaggcatgctttggttgtgactccagcagcgcgggttggtggcatcttacactgaacagcctgggcctccactctccccttctgtaaattttgcctgtcactaattgtttgggcccagtttcttcatttatataagaggattataagatttttgtgaggggatggtcaataattaagtgaaaaacagatgatgtatgttcataatcaccttttagtctctaggtcattaagcctagattagcctattttggtgtattagaaatttgctgattatctggactatgtattagtagtacatgtagaagatttcttttttctgtgtgtgtgtgtgtgtgtgtgtgtgtgtgtgtgtgtgttttcttatagatgtggtctcactctgtttcccaggctgaagtgcagtggtgcaatctcagctcatgcaatgccaccaatccatgttgctggagtcacaaccaaagcatgcctggtctcagtagttaagaacctactgttggtagaaagggtattttgtatataatggaacatttataaatggattaggcttgcttaggcctgggttcaagcaatccttccgccctagactcctaagtaattggaactataggcacatgccaccacgcccagctagtttttgtgtattttttgtagagacggggttttgccacgtcacccagaacagccttgaactcctgtgactgttgtgggaaattgatctagactcaagtgatctccctgcttcggcctccaaaagtgctgggattacaggtgtgagccactgtgcctggcctgtaaatatgtttgaattacctcatttcatcttgcatgcttgttatttttaacatgccttttctccctttaatttttaaaaaatttggctgggcatggtgacgcacgcctgtaatcccagcactttgagaggcataggtgggtggatcacttgaagccaggagtttgagaccaacctggccaacatggtgaaaccctgtgtctgttaaaaaaaaaaaaaaattagccaagtgtggtggcacgcacctgtaatcccagctatttgggaggctgaggcaggagaatcacttgaacccaggaggcggaggctgcagtgagcagagattgtgccactgcactccagcctgagtaacagagcgagactccatctcaaaaaaaaaaaggccggaatcctagcactttgggaggctgaggtgggcggattgcctgagctcaggagttccagaccagcctggtcaacatgatgaaaccccgtctctactaaaaatagaaaaattagctgggcgtggtggtgggtgcctataatcccagctactggagaggctgaggcaggagaagtgcttgaacctggagggcggatgttgcaatgagccaagattgcaccacttcactccagcctgggcgaaagagcgaaactctctctcaaaaaacaaaaaaacaaacaaaaaaatttttttttttttttttttttttttttttttttttttttttagacggagtcttgctccgttgctcaggctggagtgcagtggcactatctcaggtcactgcagcctccgcctcccaggttcaagcgattcccctgcactcagcctcctaagtagctgggattacaggtgctcaccaccacacccagctaatttttatatttttagtagagatggggttttgccatgttggccaggctggtctcgaacacctgacctcaggcgatctgcccacctcggactcccaaagtgctgggtttacaggcgtgagccaccgcacctggccaaaaaaatttgaaaattttcaaacattcaggaaagttgaaagaacagcacaatgacatacttgttttaaaagaccaattacagtttaattatttgatataaagttaagttttaaattatgccagtaattaatactttagacattttattccacatggttaaattttacctttttaactattcaacttagtatttatgtgctagaacctaaaatccctaattgtttatgttttgttttgatttttattttttggaattgttgcatattttctgaataatcttcccatgtttatgatagcaaaacattggaactgaaataacaaatctgtttcaatatacttttttatcatgcaaaatgacattttaataaatattgttttagccaggcacggtggctcacgcctgtaatcctagcactttgggaggctgaggcgggcagatcacctgaggtcaggagttcaggaccagcctggccaacatggtgaaaccctgtctctaccaaagtacaaaaattagccgggcatgatggccggtgcctgtaattccagctactcgggaggctgagatggaaaaatcgcttgaacttgggagatggtggttgcagtgattgcagtgagccgagatcgcaccactgcactccagcctgggtggctgagcgagactctgtctgtgtgtgtgtgtgtgtgtgtgtgtgtgtgtatacacatatatacgtatatataaattgtatatatataaagaaagaatatatatataaagaatatatatgcgtatatatataaagaaataaagttgttttaaggatggtcattctagtttataaatacatgtttattagaggccttctacttatctatatcaacattagggattttaatgtaagtgccaaaattaaggatcatcagtattttttcttttgactttctgtaattggctcttttttcctgaagctgaaatgaagaaagattaaagacttcttaaacatattctagctttggtttaaaaatctgaacattatccaaacttgaagaaactatttacctgtttcttcattgcttaatacttagtctctatgtttttctattttttgtacctaaataaggagtgtttgtctcaataaaatatctaggtccagcaatatgtttagaaaggttttaataacttgctgaaagcatgcattttgtgtaaagtgtggcaaagaaggaaacaattgtactttcactgggaaaagactaaaaggaaatataaataccaagctgttgatagaggttgccttcggagagtggaattgtggatttttttttcacctatcttttcagttttctaaatttcccacaattgtcacctataacctttaaagggggaaagtgtaagcaatcatgatgtaggccctgttgtaaaacagaagtaaatgggactgtgcctatttgcctacttggtgctgcccttttccgtgtgttgtctcctcgccgaagagctccgggcccttagccctgaggtgctgcctctgcttggggctgagcttcctgcactcctgggtaactctcctgctttctaggccacagggccagggacctcagagagaagaatgcctttccttttctctaggtatgtttctgtttgttttcagcgtaggtgacctaccttatgctgctgaagtcccctcatagagatagaactgatttcgttcacttttttcttttcttaactgctctaggctttctgttagattttcaaaaaatgtgtgacttcctgcttacatatggtaaatgtttacacgtcaggaagcttttcctttttgtgtgtaagaagtagaagctcactggacttatatgtcagcattctattaatcttaattcccccattttgtttctgtgatctgctatgacattacaaaaaaaattggtttatctttcttctttcgttttccagtgcctttattgcatggaacagtatcccctgcacccacgcttcaccctggttagtttaccaggctaactactttgtgcctctttggtgaagttcgtattcctaaaagtatgaggttatcatcatgggctctgaatccagactctctcttccattgtttaataactgtataaactgtgttttagtctctggaagagggaatactaataatatttagtccatagctttgttaataggattaaattggctaatataggtcaggtgtacttgcaagcacttaaactttccattcgttattataagctattactattaaggatcatgccagtaaatcctcaccaaaattgacttcattattttggcataatgttattgtagactattatctttgattccgggagtaaggctaagttgtcatttgaatgagataaggacctcgaaatcagttgtaaagacaatcttggccgggcgcggtggctcacacctgtaatcccagcactttgggaggccagggtgggcagatcacgaggtcaggagattgagaccatcctggctaacatggagaaacccatctctactaaaaaaaaaaaaaaaaaaaaaaaatacaaacaaaaacattagccaggcgtggtggcaggtgcctgtagtcccagctacttgggaggctgaggccggagaatggcgtgaacctgggaggcagaggttgcagtgagccgagatcgggccactgcactccagcctgggcaacagagcaagactccgtctcaaaaaaaaaaaaaaaaaaagacaaaatgttttaatgaggagataaaaatcactgaaccagcctgttgtttttatattggatcagtatagctttgtaccgtacctggaaataaaaataaaaatttttcctgagtaaattaataagatgtaggaaagatattaaggtttatttttaagtaagctctaaatagaaatgataatctgattataaaaagaagaatatgaaaaatatttaatatgctagtgctctgactcaaaaattaaaacctacattttttctttattatttgttttttgagacagagtctcgctctatcacccaggctggagtgcagtggcacgatctcagctcactgcaagctctgcctcctgggttcacaccattctcctgcctcagcttcccgagtagctgcgactacaggtgcctgccaccacacccggctaatttttttttttgtatttttagtagagacagggtttcactgtgttagccaggatagtcttgatctcctgacctcatgatccgcccgcctcagcctcccaaagtgctgggattacaggcgtgagccactgcacctggctaaaacctacatttttttcaattctctttttaacatttgaaaattttgcttaatctaaaatatactccagaagtttaaatggaaagaccttaataaaatattcagtcaaatgctcttcctttagaaatggaggtactgaagttcatttctcctatcattctaaattgatgtttcattttgactatatatttagtgagttatggcagtaaaagcagctttaattttttttctgaaagcctactcatattggagccctttataacttgcctcttgaagtatatatatttattcatacaaatcaaacactgatgtctgtgaagtttcatatcatcttttatatttgaattttgttcatatacttattgtcacccaggctggaagtacagtggtgtaatctcagctcactgcaacctctgcctcctgggttcaagtgattctcctgcctcagcctcccgagtagctgggattacaggcatgtgccaccatgctggctaatttttctatttttagtagagatggggtttcgccatgttggccaggctggtctggaactcctgacctcaagtgatctgcccacctcagcctcccaaagtgctgggattacaggcatgagccaccaagtttttaattgatggcattttaaagaatacctcatattttatactttccagacattttccccacttatatgaaatttaaaatgagagtatagctgttatttgttacttggtcataaaggtatttggaaaagcactgatcttagaattttaataaaaggcatttattaccaaaaaaaaaaaaacactggatatattgaccttaaaatgagtaattagtattttccagtaaagcattttggattcaacatagactatgcttcaccctacctcacttctattagaaaaccttttttaaaaagaaattttctttttgtcagctttagtaaataatgtcattcaggattcctattcacaatctgagatctgccacttaacttgctcagaagccttacagtccacaccatttgttctatcctttcaattcaggttttatttgtttatttatttatttattttttttggcgtgctgttgcacaatcttggctcactgcaacctctgccttctgggttcaagtgattctcctgcctcagcctcccgagtagctaaggttacaggcgtgcgctatcacgcccagctaatttttgtatttttagtagagatggggtttcaccatgttagccaggctggtgttgaactcctgacctcaagtgatccacccgcctcggcctcccaaagtgctgggattacaggtgtgagccactgcacctggcctcaattcagtttttaacttgagcttaaacgagatattttttaaaagttaaaatctgtgttgaggcatatcaagaattgctatgtctcttgggggagagatgtgaattccatcaacatagatatgctagtttatagtgaactgttaggaatgctgtacccttgactcatacttagtcttttctttgtggcttgtggctctcttttcaacttcattaacatgtaattgaagtgtactaaatgcatatacttattttttatgttttttcaattttttattttttgtgtgtgttggggggtctcactatgttgcccaggctagtcttgaactcctggcctaaagtgatgctcccaccttggcatcccaaagcactttacagatgtgaggcactgcactttaaatgtgtatatttaaaaatgtacagtttggttagttttgacatgagcatatgcctgtgaaatcatcattcccaagagagcaaacacttctgttcccccaaaaggttcttgtgcctctctgttttgtgtcctttcttctcctcccatcttcaggaaaccactgatggggtttttgtcactataattagtttacattttctagaatttttctggaagtggaatcatagatatatacttcttttttaatctgacttctttcacttagcataataattttgagattcacgcatgttgttgcctgtgtaacagttggttactttttattgccaagtagcatttcattggatggatagatcatcatttgtttattcattgatcagttgattgacatttgggtttcagtttttggctcttaaaaataaagcttgatagtacatttgtatagaaatctttgtgtgggcataaattttcatttctcttaaccaaatacctagaagtagagtggctaggtggagtggtagctgtgtaatgttttaagaaaactatatttttaaaagtttgtacaattttacattcctctcagcagtgtgtagagctgttccacatcctcaccaacactagatgtggtcattctttctcatattagccattctagtggaaatatagtggcatatcagtgtgattttagtttgcatttccctgatgattaataatgttgaacatcttttcatgggtttattgcccatttctagaagttattttacatctcagccatttcctcactgagctgtcttattcttaaattgtaagagttctttagatattgtggatacaagtactttttctaatgtatgtgttgcaagtaagtgttttctttgtggtttgcttttttgttttcataagggttatcttttgaagaactgtttttttgttttttttattactttgaagcccagtttactaattttttcttttttgtttttttttgagatggagttttgctcttgttgcccaggctggagtgcaatggcgcgatctcggctcacagcaacttcgcctcccaggttcaggccattctcctgcctcagcctccagagtagctaggattacaggcatgcgccaccacgcccggctaattttgtatttttagtagagacgggtttctccatgttggtcaggctggtctggaactccggacctcaggtgatccacccgccttggcctcccaaagtgctgggattataggcgtgagccaccgcacccggcctaattttttcttttataaatcatgcttccttgtgttttgagaaattgcctagcctaagttcaggaagatattctcccatcttttaagatttttatatgaagcatatatggttttgcatttaggcctaggacccgttttgaattaatttttgtgtattatgtaaagtgtcagtgttggcttttctccccacctggatatccagttgatccactttgtttgttgaaagacttttttcctccagtgatttgtctttacaactttgccaaaaatcagttaaccaaacgggtaggtctttctgaactcttcttttctgttttattgatctgtctctttacaccaatcccaaaaggccttgactactgttgttttatagtaaatcttgaaatcagggtaaatctttcaactttgttcttttaaaaagttgctctgcttattctaggtctttactatcagcttgccgatttctgccacaaagcctgctgcaattttgattgggattgcattgaatatacaaaccctttggaaagaatggcattttcacagtatttaatctttcaacccatgaacttagtatcttagtaccatttatttaggtcttctttaagttttcttcgcaatattttgtagttctaagtgtagaggccttgtatatgtttttttgtgtgtttgtttgagacggagtttcactcttgttgcccaggctgggcctcccgggttcaagcgattttcatgcctcagcctcccaagtagctggaattacgggcatgtgccaccatgcctggctgattttgtatttttagtggtcaggctggtctcgaactcctgtcctcaggtgactcacccgccttggcttcccaaagtgctgaggttacaggcgtgaggcaccgcgcccagcctgtcttttgttaaatttacatttagaaattttacatattttgatgctactgtaaaacagttgtttttcttaattccactttccaattttttgcttgctagtatttaagaattcagttcattttaatacattaaccttttatcctgcagttttgttaaattcacttattgaatatagttattgttttctagattctctgggattttctatataaatagtgatatctgtaaataaggagagctttatttttactttccaatcttcatgcctattttttgcttgttgtttttcttgtcttattactttattgagtaatctccatatcagtgttgcacagaagtggtaaaagcagatatccttgtcttcttcctgatctcaggctgagaaattcagtctttaaccgttaactgtgatgttagatgtaggttgttcatggatcccctatatctgtttgtagaagtttcctactaattctaatttgctgagaggcatttttttttgtttttttttttttttgagacagagtctcgctttgtcacccgggctggagtgcagtggcatgatctcggctcactgcaagctctgcctcccgggttcacgccattctcctgcctcagcttcccgagtagctgggactgcaggcaccggccaccacgcctggctaattttttgtatttttaggagagacggggtttcaccgtgttagccaggatggtctcgacctcctgacctcgtgaaccgcccgtcccaaagtgctgggattacaggcgtgagccaccacacccggcctggttttttttaatcatgattggatgttgcgtttttgtcagaagcttttaaaaaaatatctgttcacatgatcatatgggctttctgctttattctgctaatatagtatattacattttctgaatggtttaatcttgccatttctaggataaactatttggttatattttagtatcctttttatataatattgatgttcaatttttaatttttgtgaatgatttttgtatctgtattctttagggatcttgttctattattttttgtaacgtctgtgaggttttggtattatagttgtatgacctaaaaaagtgaagtgggtagtgatctcctttttttttgtttgtaaaacttttcataatttttgtattatttcttctttgaaagaattcaccagtgaaacagactatggctttcttttgggggaagttttttgttttttttttttttcttttgagacggagtcttgctccgtcgccaggctggagtgcagtgctgcgatctcggctcactgcaacctccgcctcttgggttcaagtgattctcctgcctcagcctcctgagcagctgggactacaggcgcgtgctaccacacccagctaattattgtatttttagtagagacgttggccaggatggtctcgatctcctgacctcgtgatcccaaagtgctgggattacaggcatgagccaccgcgcctggccggggaaggtttttaatgataaaatcagcttctttaataaatataagagtattcacattctcgtatcaattttagtaagctttattttccaagaaatttgtttcttttatctacactgtcaaatttattggcataaggctttttactatttcttattttttaaatgtttgtaggattgatggggatgccccttatttctacgatttttttttctctctgtatctagctcgaggtttgtaaattttttttttcaaagaaccaaagtttgattttgtaattttctctattgtctgcatttttattcatcctgccatatcactgtaatttcctttcttctacttactgttggtttacatttctttttccaagtttttttctgttattgtttagattactaacatttaatgtaattatcggttgttggaattagacctgccatcttcctattactggttttgtttgtcctttctgtttttttttctttctttcttctgtttcttttttcttgacatctttggatttttaacattccattttcatttgcctcttgactttttggctatgtctttttctgtgtgttgtgtgtgtgtgtgtgtgtgtgtgtgtgtgtgtgtgtgttgtgtaattgctccaggtagtaaatatatttacttaaccttttattatcagcttagagttaatattttatcacttcacatagaatgtagaaggcttgcagccataaaagtccctttaccctccccccagagacatttatgttacagttgtcatatgtgttatatttatgttgaaaccctactacacagtgttacagtatttgctttcaacagtctacatattttaaagaccctaataggaaaaataaatttatatttactcagatgtttgccatttcttttgctctgctttcattcttaaagatctcagcttctctctaaaattttcatttgattctttttaaactagtttttctttctctgctgataacttgtatctttccatgcatttgtgtttgtgtttgcctcatggaaagtaggtgtaatggctgttctacagtctttgtgtgataatctcaacattttcattgtcttggagttggcatctgttgattgcaattttttttttttaagaatttgtcagattttcctacttctttgtatgtccagtagttttggattatatcctggacattgtgagtttcatgttgtatagatgttgtgtgctgttgtaatcctctgcagaatgctgtttgtttcagtaggtatctaacttggttagatctgccttggttatataccagactataaattctctatgctgtctgtggacaggggttcctttctcagttcagttttcaagaccagtgagtgctgtgcttctttgagcctgccgtgcatatccatatctcaggtgtgagcctaagacaagcgggagttaattcacacaatggcaggtcccatttctaccttctttcctctctggttttccccacactttacagcccacaggtgcctttttcattagttcctttaaccacaaagaccgtgtttctgttggagttttagtctctgcacctgtgcttcactgcatagctccctgactggggcccacctgtggggcagagttgtagagaaaagacaaaaaagaaagtttttactccatggaaaggaaactttttagaaactttttactcacctcccaaatctgcctgcttttgtctacttcttattgtcctcaagtattatagttacattttgtgttctgtctgctatagcagaagcagaactctggtttgtgacattttattttatttttatttttgagactgagtcttgctcttgctgcccaggctggagtgctgtggcaggatctcggttcactgtaacctctgcctcctgggttcaagcgattcttgagcctcaccctcctgagtagctgggattacgagtgcccaccaccacgcccatctaatttttgtatttttattagagacagggttttatcatgttggccaggctggtcacgaactcctgacctcaagtgatccgcctgccttggcctcgcaaagtgctgggattccaggtgggagccaccgtgcctgaccaggttttgtgacattatttaatgtgttggatatgtgattattctttttcaacatggtagcctttttttgtttttgtttttgagacggagtcttgctccgtctcccaggctggagtgcggtggcacgatctaggctcactgcaagctctgcctcccaggttcacgccattctcctgcctcagcctcccgagtagctgggactacaggcgcccgccaccacgcctggctaattttttttggtatttttagtagagacggggtttcaccatgttagccaggatggtctcaatctgctgacctcatgatctgcttgcctcggcctcccagagtgctgggattacaggcgtgagcaccactcccggtctcaacatggtagccttttacaaattactatatttttttcaaattgtagtaattcatacagcaagcatatataatggtaggacaaaacaccttaagccaagatgtcatctccatggtctgtccaggtagcatagaacacaaaaggagatgtgattgaaagatgttgcttcatctacatgtttctactattgtctggggttccttaggagccaaggagaacctcgctgtgattggcattggaaagacctgtggttggaagaaaattacctgggaacattccagcctcatcttttttttttttttttttttttttgagacggagtcttgctctgtcacccaagctggagtgcagtggcgctatctcggctcactgcaacctccggctctcgggttcaagcaattctcctgcctcagcctcctgagtagctgggactacaggcatgtgccaccacaccgggctaattttttgtttggtggagacggggttttaccgtgttagccaggatggtctccatctcttgacctcgtgatccacccgccttggcctcccaaagtgctggaattacaggcgtgagccaccgcccctggcccagcctcatctttaagccataatttggctattgtgttagtgaataaacctgaaaggtacatcttcattcatacataaacataatttagttttcattaggtagattccttgttcacatccagctgagaacatgacactaaagaaatcgggctttaattggggagggaaagagagagaacgtggagtccctttggttgtcacttaagagatacagatgaaggagaagtagagttggaggtcagaagggccagaaggtaaatgtagtctaatattagtcatagtgaggtgaaggcttttggagggtagagattcacctagggtgagaattatttcctaagttctagagtagcatggtaaataacaaatagtcttaggtgctttgtcaggaactgataatgactacaagtatatttgaaatcataagagttatatttatgtttgctgtgatcctctcatagtagctgtgaaatatttaaagtaaggcataaaattattatatctatatctatatctataagtaaaaatggtctattttaatgccttcagtatcatagttgagtattaagctaatgctaacttcataaaatcattttttcctaagataatttttgagatttataggaaggtagaaatgcatgcatttcctctggatttgccatttgttgcatagtattatgtataacattttcttaaacaaaaagcttaaagaaaatattagcaaatcaaacctagctgtgtagtgaaagaataacatgcatatatgaattggtctattgtacaaattctaggataattcagtatttgcaaatatgtcactataattcagaatgtaagtaaaggagaaattcattatctcactagatgcttaaagaaagcttctgaaaaaaatttagccatttcttaataaaattataaaaaataggaatagaaggaaactacataaatatggtaaataatctttactaaaatacaacaacaaaccaacctattaaaatatgaaataccaaaactgtcactgtgaaagtcacaggcaatacaaaaattattgctatcacaactattttgtatagcttagtattattgctttgggctagtaatgtaaggctaaattctttatttccagaaaatataggtctaggaaatctaaagagattcatatgtgagactattagcactaataagaaagtatggtaaagtagctggatacaaagaagagaaatcaataacctctttattttgcaacacagtaaaaaaatggaagtaaaactgaatgaacagaatgtattctcatatatattaaatatctgttttactatgcatttaaaatccagagcttaccatttttgggaaactctacaaaaagatatatgacatgttgattccaaaaggattttatgaggactaagtgagataaaacacactaaaatgttcaagagaattatcaaggttgcctatacaatatattgaatgagaaattgtcgaggaaaagaaaggcagctgcaatttctaaagggaatctacagtgagaagtagtctgattcacaaacctctggttaaatatggtgtcttgactacacttgttttctccttccctaaagtctgcaataatctcaaaggaagcttaaaaatgttaattcatagctgggcagatggggtgttgtcacctgtaatcccagctacttcggaggcagaggcaggagaattgcttgaacccaggaggtggaggttgcagtgagccaagattgcaccactgcactccagcctggggacggagtgagactctgtctcaataaataaataaaataataaaatacataaataagtgaaatcttaattcataaggagaaacataacagtaaaggagacagtgaccaaagattttaacaatttttcaaaacagaaagtgaatggagggagtagtaactgagttcacagagaaagataccacctaagtacctgcagaggtcagttatggagataacagcatgccccagggatatcttgagagagttccttgtgcttgggggctccacgtattccaaaaggctgaagtcagttttacagctcacagtggaaattccttaaaagtccatatccagatctcttagaccttcctctcctacactccagcagatgggtaactacttcagtcccgtctgctggggaaatgggaggagcgctagaaccggaagtgctccagactagagaggtgaagcacgggattgaaagtcaagtgagcctgtacaggtctgcacactgaagtgtagggccctacctccttccttcttcactcctcctcaaggcagcacttagatgagttgatcccttcacaccccacccagcagttcgttctacctggcaaaacttaacagcttcggtgaagaaacctccacattactgaacatttggaggtgtcccaatgaaaaggtaactcaatatacctgatcattttacagagaagcccatcagtcaacaagcttgccacccacgctgagcttgggcagttttttagtgcctcattattaaatatggaggcgcatccagggaccactagatatacaaggaaaaccttaaaagtgaaagagacgaccgagacaggcggatcacaaggtcaggagttcgagaccagcctggccaacatggtgaaactccatctctactaaaaatacaaaaattagccgggcatggtggggcgagcctgtaatcccagctactcaggaggctgaggcaagagaattgcttgaacctgggaggcagaggttgcagtgagctgagatcgcctgggcaacaaagcaagactccgtctcaaaaaaaaaaaaaagtgaaagagacccagtcaatgagccaatgaacaaaaaaggaacccagaggaatccaatgatccaagaaacagaagaacagagaacaagaaagtgcttttggaaatttaaaaatgtgatagttggaaaaaacttctgtggacaaattggaagatgaaattgagatgtattagggcaagagactcattttttttaatttaaatttaagattttaaatctgtgagtatttagtactcattctttttttttttttaatttttgtttttgagacagggtctctctccagttgctcaggctggagtacagtgacaccgtcttagctcactgtagccttgacctcccgagctcaggttattctgccacctcagcctcctgagtagctgggactacaggctcatgcaaccacgcctggctaatttttgtatttttactagaaacagggttttgccatgttgcccaggctgatcttgaactcttggactcaagtgatctgcccgactcagcctctcaaagtgctgggattacaggtgtgagccactgtgcccagtcaatactcatttttaactgtgcatttaccctgttaaattaaacgtaaggaaaaatattcactaaatctggatttttttgagacggagtctggctaagtcacccaggctggagtgcaggggtgcaatctcggctcactgcaagctccatctcctgggttcacgccattctcctgcctcagcctcccgagtagctgggactacaggcgcccgccaccacgcccagctaattttttttgtgtgtgtgtgtgtttccagtagagatggggttttaccgtgttagctaggatggtctcgatctcctgaccttgtgatccgcccgccttggcctcccaaagttctgggattacaggcgtgagccactgcgcccggccctaaatctggatttttgtttttagttagagaagaggactggctttttttcacatcggctgttgatgaataaataatgcctgatggagatttttggagcattagatttgtgtttggtagtctgggacagatgttagtgtaatatgcattgtttacaggatatggagttagcaggacagctaactccacagcgtttggtcaccaaacgaatgatatcgtgctaatcacgtaccctttctgattttcatttacctgatccataatatggggatggtaataatggtaacctatctcacagggctgtgatgatgagtagaagagataagacctataataaattacctagtataatgtgtagcatgtactaaatgctcaatgaaaagaagctttgattataaccatcaagtagatggactggtaattatagatggttaagaaaaaggtacagtcagccctccgtatccatgggtttcacagagtccataggttcagcctaccatagattgaaaacatttgggggaagaaattatgtctatactaaacatgtacagacttttaagcttacagaataacagttgtttacatagcatttaccttgtattaaatattgtaagtaatctagagattatttgaagtatgcaagaggacgtgcttaggttatatgcaaatactgtgccattttatatcagggacttgaggatccacggatttttttttaatccatgggaggtcttggaaccagtgttcctgggataatgagggacaactgtatacttaaaaagtaacacgtgaatgaatgaattccttaattgtagagctatgctctggctctagtattagtcctctgaccattaaagatagcatgttggtgtgtttatgattatacaggaattaagttttcataaacttaaatgttgcattttcacttacaggcgtcgattagcaaggtaaaagtaacagaaccatggctcagtttccaacaccttttggtggtaagttttcagaaatttctctttttaatgtactttgggaccagattttaaaaacttgatattatggcaaatttaaaattaaaaagtagagaaaataatataatcagcattcatgtattccatcatatagtttcattaattatcaactcatgcccaatattgtttcatctggattcttttggagcaactcccaggcatcatttcatctataaatattttagtatgtgtacctaaaagataagaaaacgtttaaagacataacttcagtaccattatcacatctataaaaatttacaataccgggccgggcatggtggctcacgcctgtaatcccagcactttgggaggccgaggctggtggatcacctgaggtctggagttcaagaccagcctggccaacatagtgaaaccctgtctctatgaaaaatacaaaaattagccgggcgtggtggcaggcacctgtagtcccagctacttgggaggctgaggcaggagaatgacatgaacccgggaggcggaggttgcagtgagccgaggtcgcaccactgcactccagcctgggcgacagagcaagactccatctctaaataaacaaacaaacaaacaataccatattattgtacctgtaaaatgttcgctacatctagtctgtaccttatagtctttggacatttccctgatagtctttagacatttcttgttatggtttgtttgtttaaattgggatccaaataagatacaaacattgcaattaggtcatgtgtttcccaagtctcttagtgaattttcccccactcctctgtttttttatcagcaagttatttgttgaagtgatggggtcatttacactttttcaaagcctggatttgaagcatgacatttttgtttgttttacttcagttaaactaaacataagtttgaaacatatcagtctgcataaaatgtgttttttgggtaatttttcctaatgttattaggaaattgttaagtgttcttgcttacacccaagttactttttaacaaaaatacttattaaaaagtacttattaaaaaatacttattaaaagttcatattaacggattactcttggaagctgtctaatcttgtcatgaagagagtaaaagtctccgtgggattctggtacagagatctgtaaacttttaaaaatcactagttattctattttatttttgtcccccttcttaattactgtacaatttctggtttttgtttatagttacagggatgaattctgacagggcagtgaaaatttcttctagaagttgcagaactgtaaggcctgtgaggaaggggtcatttctgtcttggacacccgttcatccccacagtaaatatttttccagtgactgaatggatttttactttatctgtcagtgtcatcccagacccggtagagaggagagatgcaatgtttagatgtttttgctggtgtgctgggcacattcacattttgtgtgaaacatacgtattgtgtattcccagttttgtggaaggtgtccgagcttttgaaagctttcatgtatgtaatctagaattattttagtcaatttgaggagacctaggactaaagtctgcaagatctcagtcgtgagtggacatctagtcagcctaagagctgaaactgaaggaaaacctaaaacccattctctttggctattatttcatatcaggacatcccctgcccttctttttttttaagtctgtttcctgcatactgagatacctgtttttaaaaacagctttagtgaaatataatttatattccataaaatttactagctttagttgtataataatttttagcaaattatatagagttgtgcagccatcaccacaatctaatatattaatattttaatcaccccccaaaagattttcatggatatttatcacactcaccttcttctttcataacttttgcctgtggcatttaaggcacttgagagtacagttttaggtttaagttaatttagtctgttgcttgggtttatgtaagtaaattattaatttactataatcttgctaactatgggattataaaacaagtttctaaaaaaggaatgtgtgcctcttcttttctttccctcccattctctctctttctgtttcttacattttgtgtcctgttttacacttttctaactttatatgcataacttccaaggacaagaagatgtgaatttatcaagtctttataatacattgacagaatcttgaagtgctgtggaaatagtgtgtgagagcattttgttttccttttctcactgaataatttgtttgtcttttctttggattttaggcagcctggatatctgggccataactgtagaggaaagagcgaagcatgatcagcagttccatagtttaaagccaatatctggattcattactggtaatcacagtcagcattttttcatttttacttatcagtagtgcagatgtctgtggaaactctatcatgcaaagacgagatgggcaaatatgaccaaggagagacatttacctgttttgccctaaccttgtgcctgtccttttacaatttttttacacataatggaatcataccttgtttgcaatttttagtgcatgtcaaaccacttgttttgtgcatgtaatttatgggaattggttaagatcaaaggaccaatggctcacacctgtaatcccagcactctgggaggccgaggtgggcagatcccttgaggtcaggagttccaaaccagcctggccaacatggtgaaaccccgtctctactaaaaataaaaaattagctgggtgtcgtggtgggcgcctgtaatcccagctacttggaggctgaggcaggagaattgtttgaaccctagaggcagaggttgcagtgagccgagatcacgccactgcactccagcctgggtgacagagcgagactccatctcaaaaataaacaaactaattttcctgtttgattatttttcagaattcactttataaaaagtggaatctttatttccaggggaattgttctgctaccatgcccagctaattttttcttcttctttttttttttgagacagaatttcgctcttgttacccaggctggagtacaatggcgtgatctcggctcactgcaacctccccttccagtttcaaacgattctcctgcctcagcctccgaagtagctgggattacaggcacccactaccatgcccagcttattttttatatttttagtagagatggggcttcaccatgttggccaggctggtcttgaacttctgacctcaggtgtcgttcttaatcattgttatttattctctgtaaatacttcagaagtacccagaatttggagtataggtattgggaatggcaaataactttttttataaagtgaaagtatgggtcatcagtttcctaaggatttctataaatgtgcttttgcacaatgggtagctgttcatatcttagttaatagcagattaattaaagtggaaaatctatgccaggaaatggtaggccctttttgagatgattttttgaattctaaagtcagtgctgatggattcttttactgttgcctatgggcttatccttggacttttataatgcactcaactggtatttatagtattaccagcctctttgtaaattttgtaattttgctattacaggatttctgtcagctgttgtttttttttttttttcctgaaactttttctgtttaatttacaggtgatcaagctagaaactttttttttcaatctgggttacctcaacctgttttagcacagatatggtaagttggaattttacatgaaattttacataagcataaggcaaaataaaatatcgttttgttctatttggtaatatgatttcttatgttataaaaggagaacatgtatctctagcctgaaatatcttgttacttcttaccagagagttatgtctgaaaagtgtctttctcatatggaactaaaacaaaacaacaaaaaaagtggtgacatttgaatgacaacactgtcaaaaagttgaatttccatggagacatctaaattttggtgttccttcaccaattagttttggcttcacccatatcacccacatttatttgaatgtcccacatttcttgctttataatggaatgattttttatctttcattgactgaagaataaaaggtaaagaaaatatttgagagttagtgcatggtaaatccataacattaatagataatagtgaattatttgactatcacaaataggcattcaatcttttaagccacaggaaatacagagagtataataaaaagggtggcaaatacagttttggattcttggctcatggctttggagagccatgctgaattctgttgtcctctaagatgtctcatttttttcaccaagggtgcttaatacttcacttccctgagttaattagtgatacgaaggcagctcgctatgaagaaagagcatgtaggctgggcgcggtggctcatgcctgtaatcccagcactttgggaggccgaggcgggcggatcacgaggtcaggagatggagaccatcctggataacacggtgaaaccccatctctcctaaaaatacaaaaaattagccaggtgtggtggcgggcgcctgtagtcccagctactcgggaggctgaggcaggagaatgatgtgaacccaggaggcagagcttgcagtgagccgagatcatgccactgcactccagcctgggcgacagagcgagactccgtctccaaaaaaaaaagagcatgtgatttgtagtcgtacacctgagtttgattcccaggtgtaccattttcagtgtctctgatttggagatacagttaccctctttgacctcaagttttctaatctagaaaataggaatggttatagttttgtgagagttgttgagaggattccagaaaaaccaaggacttattgtggctcctgtcacataataggccctcaaagtaaaacccaaaaaggtatcatctccaggggctgggtattctacataactgaattttccagctaactactttgtcctcttaaattaccaaacttttaaatttataatcttgtggaaattaataaaggttgatacagctttttgtttcttttaagcacagtctacagaacacaatctaagcttttcttgatgaaatgtcatcattatgaaaattagtaactgtcctgaaatagcaaaactttcacaggagattgtgtgtgtgtgtttgtgtgtgtgtgtgtgtgtatttggatatatttgaattgaaacgaaatgataccagatctctgtgctttttttgggtatctgctttattttctttttcctggttgtcagcatattggccgccagactgtctctaaactagtgtgcttgctcctctgaagccattctaattctaacttctgatctattagagctaaaaaatcagataaccaagcggttttggaattacagtttaagtaaagtaagatgctcagatgaagaaacagcctgcaagaaagaagtcatgtgcaagtgagcacagaagccctgttctgtcagttaaatgtgaaagtttaaacgcaagagacctgtggcacctttgtgaattttaacaagcttctgctttgcagctcatacatgatcatgtctcataccatcaggacctctcgctggaaccttcttccgcagacttaacttcctccactggattatgcttttgtgttatattcccaatttttcaaagttcatttattctttcaacattgaaaaattatttatcagatatctcctgtgggccagggactgttaagaggtgctgcggatatagcaatgaacaaaatagacagaatccattcttttactgaaacggcagtctagtggagggagacaataacaacacaaaaattgtcacatggtggtaagtgtggtggagaaaaataaaatacactctaatgaatttcattttttttcttctgttttttgtaaaggtgggatcttgctatgttgtccatgctggtctcgaactcctggactcaggccatcttcctgcctttgcctcccaaagtgctgggattataggtgtggccaccatgcctggcaaagacaactgtcttaattgaaaaaagtgacatttggctgggtgtggtggcccacgtctgtaatctcaatgctttgggaggccaaggtgggagcatcgcttgcgcccaggagtttgagaccaacctgggcaatataatgagccctcatctttaaaaaaaaaaaaaaaattttttttttttgtttttttttttttttttttgagatggagttttgcccttgttgtccaggctggattgcaatggcacgatcttagctcactgcaacctctgcctcccggcttcaagcgattctcctgcctcagcctcctgagtagctgggattacaggcgtacaccaccacgcctggctgattttggtatttttagtagagatgggatttcaccatgttggtcatgctggtctcaaactcctgaccttgtgatccacctgcctcgacctcccaaagtgctgggattacaggcgtgagtcactgtgcccggccaaaaaaattttttttaattagctgggcattgtggtgcatgcctgtagtcttagctgctagggaggctgaagtgggaggattgcttgagccctggagtttgaggctgcagtcagctatgattgtgccttctagcgtgggtgacagagcaagaccctgtctctaaaaaataaaaacagttgtcctaactttctaaactatttttacctgagtggcccaaagtcaggtttttataatgactatgtatattaattaaagatggtaatgtggcaatcttagattgaatgaatctttaatttttttcttacgttttgctaaataaatttgtgatggcgtattttactatcaaaaatgtctgtaactctcttttcccaaaagaaatgtctttgaaaagtcattggaaatttcatgaaccactgatatcctgcccagatgatggaataatgcagtgcaaattatgagtttagcaagatctgcctttcaactgagctgatttgatacttattcacatagtaaccctgagtagtacttgatctcttaaagcctaggtttttttgtttgtttgtttgtgtttatgttttgagacggagtcttgctctgttgctcaggctggagtgcaatggcacgatcttagctcactgcaacctctgcctcccaggttcaagtgattctcctgcctcagcctcccaagtagctgagattacaggtgcccacgaccatgcccgcctaacctttgtatttttagtagagacaggttttcaccatgttggctagcctggtctcgaactcctgacctgaagtgatctgcctgcctcggcctcccaaagtgctagaattacaggcatgacccactgcagccggccaagcctaggtttttaaaattgcaactaataatagctgatctaaagaagcagctccctccaacccccatactatttttatgttcttctgtgatttttctggtagggtcccagggtaagtccttactccttttggtagacggaagaatgggtttgactctgaagttttaggcagtccttgtgtcagtcatctggggaagaagataattttttgcttttttgtttgtttttgagacagggtcttactctgtcaccaagactggagtgcagtggcatgatcatagctcactgcagcctcaatattctgggctcaaacaatcctccggactcaaacaatcctcccacctcagcctcctgagtagctgagtctacaggcatacaccaccatgcctggctaatttttgtattttatgtagagatggggttttgtcatgttgcccaggctggtcttgaactcctagattcaagccgtctgcccgcctcagcctcccaaagtgctgggattataggcattagccatcacatccagcaaagaagagaagtttggattaagaattggaaactgtgtctagtttctctctctgagctttacttactttgttctggactttgtttcaaatatttgagtgatacgaactgatggacagtatatgttagaaacctttattatgttttatttccatgtagaaactatattccagttaactaatttgttaactttcaactgtaatctgttaatgctttggggactccttgtctctcctggctgatttccaattaagaatacaagaaaaccttaattctcggaggatggagtcaagtcagtgtgtgtcatgccaaattataaccgtggccaaagatggtacatcttcctagaaattgtcttattaataaggagctggaaggaggttggcagatatccttttggcaattgaagtgcttagaattttttcaactttgctatgatgtggaggggaggagaataaagcagtgggaatagacaagagccagaaggtacaggaaggaagaagagacggggtgaagaggctggatgagggctctggaatctgagacggagggccagcagaaatggagagaaaagagggagtgagggagcactacctggaaatgggccctgagaggaaagaagggagccagacacatgaaggcaaggattagatcaactttgtgatctggttcagaatgggtgtcagggcaaacagccatatagtcatagtttgtactttcttaagacactcctgagtatgtgtcagaagggccttcagccccaacaagatcaatttgctaaactcatacaaaaaaaaaaaaaaaaaagaataagcaccctggactcttgatcccctctcctccatccctcattcctgagtctttaccatccagtagctcatggcgttgaactaagatgacatcttagttacctggctgcccaaaccaacacctgggcaccgtgcttgatttccctcttttcttcaccctgcatacccagtccatcaacgtaattgcatttacggactttatccccaatctggccacttctttcctactgctaccatcctaacctgtcatctcacctgggcccactgttcgagcatctggactgggttctctctttcacacttgcccctttagagtctagtctccaaacagcagctggaattttttttttttttttttgagacaaagtctcactctgtcgcccaagctgggcagtggcgcaatctgggctcactgcaacctctgtctcccgggtctaagtgattcttctgcatcagcaccttgactaactgggattacaggtgcacactaccatgcctggctaatttttgtatttttagtagagacggggtttcaccatgtcagccaggctgggctcgaactcctgacctcagatgatccacctgcctcggcctctcaaagtgctgggattataggcatgagccaccgcacccggccaggaataatcttttgaggagtgcagtggtgcgatctcagctcactgcaacctctgcctcacagcttcaagtgattctcctgcctcagcctcccgagtagctgggactacaggcgcgcgccactatgcccagctaatttttgtatttttagtagcagggtttcaccatgttgggcaggatggtctggatctcctgacattgtgatccgcctgcctcggcctcccaaagtgctgggattacaggcttgagccaccctgcccagccttcttcctgttctttaaatgggccaggtttctccttgcctcagggtcattgtacttagtgtttcctcttcctataattcagttgctctagttcctcacatcgcaggttcattgcctttcaggtttcagttcatatgtcacctccccaaagtggcattccctgaccagctagtgtaaagtggtcccctctgcccacctctttccctttaccttggtagcacttatcaccatgtaaaataatctggtttgttctcttgttagttctgcttgcactaaaatataagctctgtggtgctaggaactgtgtctttttcatagatataaccccaatttccagatagatgcccagccccccactcccccctgccccataattggtttttgaatgaatgagaatgaatgactggattagtctgcactgctgctgggtctcacctccagcccaaggggcagcaggtgagagatgagcagcctgaggccaggctttgtggatgaactgggctcctaaaggaatctgtaggtgccaacactgcagggaatgaggtgggacaagaggagcctggcctcatcccttcatcctgtaacacacacaaagtagtttcagaattgttacattcacctccactacaaacaacaaatttaggcccagtgcagtggctcatgcctgtaatctcagcactttgggaggtcgaggcaggaggatcacttgagcccaggagtttgagacctgcctgggcaacatagtgagaccccgtctctactttaaaaaaaaaattatccaggtatggtggcacatgcctgtagtctcagctactcagaggatggggtgggaggatcacttgagctgaggattcaagcctgcattgcgctatgattgtgccactgtactccagcctgggcaacagagtgagaccctgtctcaaacaaacaaacaaataaaaaaaaaaaaaagaacctagtaagtagtgtaaaccaaaaagtatctgagacaagaggtctcaatcattttaggagtttattttgctaaagttaaggacatgccgggaggaaataagcacagaatcacagaaactgtgcttttctccaacgatgattttgatggcttcagtatttaaagggaacaggtaggctggagggcaaagagggaggatatggtaatccatatattgccagagaaaaggagcaggcaggggaatagtcagttaggtaatagtaaatcagtaaagtgctcagtaagtcggcactttacataagataaaatggaacataaagtagcctgtagaggtgtttgaccttttatttgtagctccctgcttaggaacaaagggactcagctttcagggactcagctttcagcttacttttctaccttttgcatagtgaattgaagtcctgcgtttttattttcctttcacagtagatttcaagattactttgtagttccttttgtttttaaacagaggacatataaagtactatgtgaagttacttggactaggcttttttttctacctcttacgtggatatgttagttatttataatatgattaggtttattttcatttttatttaatttagatatgcctcctcatctttgtggacttaattttattatttaaatacataacagattaaaaaggttctaaaaaccgaaactaacaaaaaggtgtgctcagacaaggtcactccctcttctatccctttaccctgtttccacccattgtattagtttcctgttatccttcatttatttttgttggaaaaaagcaggtacataatgtatataacgtgtatgtattcatatttaaattacttcctttcctccttacattaaggtaacctgctataaatgctctctgttcttttttttttttttttttttttttttttctggagacagagtcttgctctgtcacccaggctggagtgcagtgacgtgatctcggctcactgcaacctccatctcctaggtttaagcaactctctgcctcagcctcctgagtagctgggattacaggcacgtgccaccatgcccagctaattttttgtatttttagtagagatggggtttcaccatcttggccaggctggtcttgaactcctgacctcatgatccacccttctcggcctcccaaagtgctgggattacaggcgtgagccaccgtgcccagcctgtttttttgtttttgtttttgtttgagatggagtcttgctccgtcacccaggctggaggtgctatcttaggtcactgcaacctccgtctcccaggttcaagcaattctcatgcctcagtctcccaaatagctgggactacaggcgcccgcgtgcccagccaatttttgtgtttttagtagagacagggtttcaccttgttggtcagactggtctcgaactcctgacctcaggtgatccacctgcctcggcctcccaaagtgctgggattagaggcatgagccaccgcgcccagccgtaactaccatatttccataaatttcttagaattttcattaccagggattccccacagttatgtttattgagaaaagcgttttttgagtatcacgacattttcaactaaatgttgggattgtcgtatgtggtttaaagtcaagtccctagaacctcatggttaagtttcttctcctcacccatgaaaacacttctgtaggacacctttagagtctaattaagccattacctaaagtcttctcccctaacctactcattatcccacactggatattcctgtttctcaccagagaccatactgggcagtggtgtggggaacagggagtgggcacctgcctgactgattgattggttttagtgtgcatgttgatgttgatttttattaatgggaactcttccccaccaaaccgttttaaatagttgcgtatcttttaaaaaactacttagcaaaagaaggaagttcaccatttcattttatttacttagtttcctttataaaacctgaaaggtagtacaaaaataaagcaaccagaagccagtttcatttatgagcatagatccaaaaaagtcaaaatcttagcaaatagaatttcacaatgtatgaaaagaatacacaatgaccaactttatgccagaggtgcaagattggttcagagtcgaaaaattctatcaacattagtcattatttcagcagataaaaggaagaagaaaacttgtgatcggattggtaattacagattaggcacccgatgaaaaatacagtaaccatttctaataagtagaaaggaaactacttaaatatgtgagactactatccatgaaaagagtcaaactctgtaaaatatttgaaaaggtttattccaagccgaatatgagtcaccaatggcctgtgacacagccctcaggagatcctgagaccatttgcccaaggtggttggtatataacatggttttatacattttagggagacataagacatcaatcaatatatgtaaaatgtacactatttcggtctggaacaatgggacaactggaagcagaggcttccaggtcatacgtggattcaagagtttttaattggcatttcattgaaagagttattatccaaagagctggaatcaatagaagggaatgtgtgggttatcataagtggttttggagaacaaagttttgtcatgcgggtgaagcctcccggtagtagacttcagagaaaatagatggtaaatatttcttatcagactttaagagcctcctttatcagtcttaaggcctgtgttgatgctaatgctggtcagctgggcctgaattccaaaagggaggagggtataatgaggcatgtctgacttcctcttcccatcttggcttgaactagtttttcaggttaattttgaaatgcccttggctgagatgaggggtccattcagatggtggggggctcaaaattttgttttcagtttacattactttccagaaatcactaccaactgtcattctaaacaatgaactctattaaactattagctctagtaaatctactgtttcatttaaactcagaactgagcaagaacgcattcagtaatgtcttagaaggcagtaagaccaataaaaaagattggcctaaatattggaaaagaaagataatgctcatttttttctagttatgtgattgtatacttagtacacccaagagattttagttttaaaacattaataagaacttgtaggagtctggtaggatagctaaatacagcctaaataattttttaaaataaaaaatgttctctgtgcttgaaataagcacctaaaaatggaaatggggggaatgtttcatctaaaatctggcaaaaatgataaaattcttcagaatacatttagcaagaaaagcatattatatgaaaaaagtgatacaattttattaaaggaaatagtatatttgaacaaccggaaagattgtcttttctttggttgggtaaactattggtgcaaaagcaattgtggtttaatcaattctccaaaaatccccttctaaggcagtttttggatcccagtagggttgtttgtataacagataaaataatctaaatgttcataggaaaatagacacccatgaataaccaagggggaaaaaaaaccttcccagaccttcccggatcacaatataccagagagccagtgtgatcaaatcattgtaatattgacctggaaattgttcagtcagaacagatagtccagaaatagttctcacttcatatgaacatttgatacatgataaaaatgtatattagttcagtgagaagaagagggattgattaataaatattactgggaaagctaggaatccatgtagaagaaatgtgattggaccctggaataactcccccacccctacccataattattggtttaaggattgaaatgaaataaaataatacaatgttagaaaatcaaggactaacaaccttctaatcatatgataaaagaaatattttatatacaaaaatttagaatttttatgccgtacatatacataaatcaacaaataatgaatttttaaaagtctttcagcagtcagcagataaacagttaatttgtgatacactatgagctcttataaactaacaacaaaagacatgcaatatatagaaaatttggcaaaggatttgaataagcagttcatagaagtgcaaatccaaatggccacgaaatacagaaaaatgatgctcaggttcacaagtagtgagaagaattcagattctgaattctttgctgaagggcccatgactacaggagaatggggaactcctatctgaggcaaaaaggtttctgcaaccacagagctttgtttcctgcgttatgatccttattttctaaaatgtgccaacttttacaatcttgatcacttttagagatttttttatctttgtcttatgccatactttttattgtgttacatgttttctttctttgagttaattccagctatgcagaattgttttctgtgtaacttaattttcttttgtgaacactgtccggatatggctcagtctaaaagatcatggtattttaattgaactgtcttatttagatctttcaaatacatttttcataatattggtttaaaaaaatcctcatgcttttaatatctggattaaaagaaataaaatctgaataaaacttttttatgcagaagaggttaagtcatgaatatgcacagttttgatgatataatgtagtttccagttacaaggacaaacttttgcttacttgatcttagccaaaaggccgagaagcgattccttttgcttactcttctttgagaaaatactttacattaaagctcattacagtttgcacttggaccgtgtatatttgagtaccattttcaaatagcagacacattttgtaagctaacttacaaaattgttgagtgatatggggcatgattctaaagaaaagttagtttcaagagctttagaggtttagtagcattatagttgagtaaccctagcatagcataagtaggtagcatagcatactgtgtcatgttcccacattgaggtttgtagagctctacaaagaatgcaatctaagtatctctagcaatattaacattccgcttctaaatctttttcttttctaatagctttattgtgaaagaattcacataataaaatttactcgtttaaagtatctaattcattggttttagtttattcacagagttgtgcgacagtcactattagctaattttagaatgttttcatcacttcagaaagaaaccccttttgatgtctaaagtacaaatcctcacactgaggctgaaaattacctgctaaagtggcagagtgaaagatattttatgtttatataaaacttggccagtatttacaggctattccccatagtttggtaaacagttatgttttctgttgttgtctctaggggtaagagtgctaattattttgttttcgtgttggtgggagtggtggttttggaaaggttcttttatggtcacagttgttctcaggccatgctgttggtttgcagggcactagctgacatgaataatgatggaagaatggatcaagtggagttttccatagctatgaaacttatcaaactgaagctacaaggatatcagctaccctctgcacttccccctgtcatgaaacagcaaccagttgctatttctagcgcaccagcatttggtaagtctgaaaatgaattggtttctgtattttcttgtatattttaaaaataaatgttttcctttttttccctctcggtttataacattatgaaattctaggaggtaattctgtctgaaaaatgatggccccctgcaggaagatagtgctggggagaagaaggagcatgttcacatttgaaccctgggatgtaaagtaatcaaaatgaaagcagagatgcaggccgccagtcaggggaaaaggaagaaacttacagtccgctgctgcagcttctgggtttttttttttttttctcttccattatccttcaggttgttgcatacttccttttgattttcggtttccataatgtctgtttctccttgtgcataaacaattcctttggattatggcatctagaaatatatatattttgaatcacagtactgagtcacttggccacattaaattctttcttagaacaaaatggaatagagaaaaaataaacattgttatcctgattaaaaacctaattccagccgggcatggtggcttacacctctaatcccagcactttgggaggctgaggcaggtggatcacctgaggtcaggagttcgagaccagcctggtcaacatggcgaaatcccatctctactgaaaatataaaaaattagccaggtgtggtggtgcgcacctgtaatcccagctactcggagaggctgaggcaggagaacctgggaggcagtggctgcagtgagccaaaattgtgccactgtactccagcctgtgcgacagagcaagacttcgtctcaaaacaaacgtgattccataaaaaattatctttcaaccaggtatttttcttataagctaattgattaattagttgactgagatcagtagttctgatttctgttctcattctagactttaggttaatttgaagatcacagtaataaaatctaacatctgattcatggggaggttctttaacagtttaaaacaaaacatgaaaattgtggctagagtttcttttcatctcttcatcctcagatagctgatgataggtgataaagtgaaatagatttcggagggggcagtcaacagtaattcagggtgtctctgatataattaatgataagctaagatacagaaatactctggttttacttactaggtttcctattaaaaacaatgtattgcctttcttttagtaagttttagccacaaggctggtttttgtaaggggaaaggttttggaagatttttaggcaaataggatagtggtccaagaaaagaaagaaaaatccatatatgagcaaaggcgaggaagagcagaagtgaacactgcagcagcctccacatgactggggccgttgtttgtcttgtccagtgtgtgctcacaatgtttagcctttagttaaccagctaatttaagtggaacttgctctgaatccctgaagatctctgtagccaatctttggtcaggacccaggcgttaaaataattcaagggtgtttggggtcgaacacagtggctcatgcctgtaatcctaatgctttgggaggccaaagcaggaggattgcttggtcccaggtgttggagaccagcctggcaacataacaaggcctcgttgctactgaaaatttaaaaattaaccaggcatagtggtgggtgcctatagtcccagccacttgggaagctgagacaagaggatcacttgagcacaagaggtcaagcctgcagtgagccaagatcacactactgcaccccagcctgggtgacaaagtgataccctgtcttaaaaaacaaaaacaaaaaacaacggtatttggttttcttttggctttcttccaatgctacaagaagaaatctcatagtggagaaaaggtcaaatgactagaggcaccccatttctcctttttctctcaaacctggggtcaataatttttcctgtaccatttaattcattttctcttattccattctgccatcagaatttcagttgtggagctattgctgatttagtttcaggaggttgtgaccttactgctgagaaagttttacagtcgttaagtaacctgctactgttaaacctgccaggatttctgacctaatactctgccaggcagcccatcactcttccccccagacttctccctgtctttcctcaccacattgatgttctcagtaaatgattttgatgaggctaaaccatgaaggatatcagaacataggagaagttaccagtatatgatcttgatcaagtttacttaagtattttctagttctacctctcagctcaatctagggtaaaatacatatatatattttatagtttgttgagccacttgagaataaaataatttattactattgtcattgttttatttatttatttatttattttgagacagactctcacttagtcgcccaggctggagtgcagtagcatgatcttggctcactgcaacctctgcctcccgggttcaagcagttctcctgtctcagcctcccgagtagctgggactacagggacatgccgcaacacccagctaatttttgtatttttaatagagacagggttccaccatgttggtcacgctggtcttgaattcctgacctcaggtgatccacccacctcagcctcccaaagtgttggcattacaggatgagccactgcacctggcctgctttctaattaatattgaaaattattggttaggtgtggtggctcatacctgtaatctcagcactttgggaggccgaggtgggcagatcgcttgcgctcaggagtttgagaccaacctgggaaacatggcaaaaccccatctctacaaaaaatacaaaaattagctgggtatggtggtgtgtgcctgtagtcctaactgcttgggaggctgaggcaaggggatggcttgagcccaggaggtggaggttgcagtgagccaagggagatcgtgccactgcactccagcctgggtgacagagccagaccctatctcaaaaaacaaaacaaaacaaaaatctgactctgcatttccttgcccttatatatagtatgtgccttcacatataatatttgatcacaatgataaccctaaaaagtatgcagactgtattagccctgttatataaatgagggaactgagattctcagaaattgaacattttgcttaaggccatatttctaacaaaggagatagaacctgtccaaagctaccatttatctaaaggcgagatggagtctcactctgtcgcccaggctggagtgcagtggcatgatctcggctcactgcaacctccgcctctcgagttcaagcaattctccttcgtcagcctcccgagtagctgggattacaggcacccaccaccacacccggctaatttttctatttttagtagcgacggggtttcaccatcttggccaggctggtcttgaactcctgaccttgtgatccacccgcctcggcctcccaaactcctggcattacaggcatgagccaccgcacccggatggctttaggttttttaaaattaccttctccgtgccttcattatcaccaaactaactgggtgacatgacgtgtcactcttccatggttccttgtctgcatgggttttttgttttgagacagggtctcactctgttgcccagactagagtgcaatggcacgatcatagctcactgtagcctccaactcctaggctcaagcgttcctcctgcttcagcctcctgtgtagctgggactacaggcatgtaccaccacactgaagtaattaaaaaattttttttatagatagagtcttgctcttttgcccaggctggtctcaaactcctaatctcaagtaatcctcccattttggcttcccaaagtgctgagattacagcataagccatggcaccaagcctcagatattttttaatgtagttgttaacacactatagaattaaggctcagactggagtctgaacaatgattttgttcaactcccctacagagaagagagaaaaatggggtgcagtgatactgtgacttgccttagagcaccctgaaaatagaattttctattgtaggaaattctatgggtagacttggtaccttctttcaccagtgtgcactcagcataattcttttgttctggacccagcttatacaggaggagtctgtttttcttttgcttggtttttgttttgccagagtacatggttttattggattaaaccagtgttttgtaagcccctactgtgtgtcctagttgctgggaacatgctggccagcaagacctcatggcttctaccactgtggatcttattttcaaattgtggggagcaaggaaataaatacttttaggtgagaataagtgcaataagttcattaaaacagagtaatagtagagagacagagagagagaaaccagtagaacaagatggccagggaagaattctttgagcagatgacttttggaactgatgtagatgatgagagccatgtgaagacctaggggagaggccttccaggctaaaggaactgcactggcaaaagtcctaaggcaaaaactagcttggggtttggaaggtgtgcgaggggcgtcgtagctgaagcatggggagaccataaggaaaagcaagcaaacaacagattaagcagaagagtgacgtggttgatagacttatctgtgttatctgaagactggaatgtaggggacaagaatggaatcctggagatcagttaggaggcttttgccacgggcaagaggcaatggtgatttatatctggtggtgataatcaatgtggaggacagattagattcattctagcctgtattttgggaaaaaagtaaaaaggacttgtcagtagattggaaataagaaatgaaaaaggagtattaaggcttttcacatgaataactagatggatggtataagtgtatactgagatggggataacaggaagaggaatggttttaaaggagaaattaagagttttggtgattttgagagtcctagtagatttccgagttgggatgttaaggagacagggatgactacgtttgactgaagctcagaggaaggatcgatcagctctggggcagtttggatatggagagcatgtcttaggggcaagcttagctataaggagtacagtgtagacccaagccttgatgtgatgtgacatttaaaggtcaggcaaaagaggagaagccagaaactgaggctgacaaaagtgaaatggcagaagattggtgtcctgctaccaagaaaaagtgtttcaagaaggagggaatgctccattgtttgagctgcttttgagagatggagtaagaatatggcagaacagtgctgattagatttgatgtgatgagcttttgagtgaccttgacaagcagtttcagtatagtgatagggacaaaatcctgattggaggcttggaagaggggagagaatttcaagaattaagacttacacaggaagaggtgatggcagccagaatacggcttctggtagatgtatttatttagaaagtcattcattcagaaaaggtagtcagttgtcaaaaggatgatagtctttttgcagtggctatttaaagcacagtaggccaggcacggtggctcatgcctgtaatcgcagcactttgggaggccaaggctggaggattgcttgaggctcctagttcaggaccagcctgggcaacatagtgagatcctatttatatttttttaatgtaagtagatagatagatagatagctaataaatttttccttttctgtaaaatggaaaaattattatgtaagagaagatttctaacaaatttggaagcttaaaagatgcttttaccagtctgatgattaaacagtatttttaaacttggccttttcctcagtgtctttttgaggttagcctccttttaggttaggggtctgcagcacagatggggtacgtgtcttgaaggttaactggttgcgcagtatgctgtgtcaagccttttgaaagtctgaatgatggctcatgaaaacttttggtttgtttccatctatttttatttgttgcttgagtagattgacattcttacttaagcaaaaaccaggatttggagtataattcagtatagttatcaaaagaaccaaatttttaaaaagaaaaacacattaaaaatatagttatcaaataatcttagaaaattttggaattctaaaactgacaaggtaaacctgatacatgttgctatgtgtggatatgtaaagttaatctgattccaaatgagatgtgtggtaatgtgcttgatagtgtgcacgtgaactgtaaaccagtcatctagatgactataattataaacttactcagtaaagcccaagttagaatttttttcttctctttgttggattttcagtgtctataaacattgtttttaaaaatgaaaataggccgggcgcagtgactcacgcctgtaatcccagcactttggggggcccaggtgggcggatcatgaggtcaggagatcgagaccatcctggctaacatgatgaaactccgtctctactaaaaatacaaaaaaaaattaaccaagcatggtggcgggtgtctgtagtcccagctgctcgggaggctgaggcaggagaatggcgtgaaccctggaggcagagcttgcagtgagctgagatcgcgtcactgcactccatcctgggcgacagagcgagattccgtctcaaaaaaaaaaaaaaaaaaaaaggaaatagtctgattttcttactgtataagtaatagatgctgcttgcgagtcaacaatgcaaaaagacttaaaaagtaaaaattactattaattctgttacccagtgatgaccactgtgttcaacaacactatttttaaaatcttttttttttttttttgaggtggagtcttgctctgtcccccaggctggagtgcagtggcaccttctcggctcactgcaacctccgcttcctgggttcaagcgattgtcctgcctcagcctccccggtagctgggattacaggcatgtgccaccacgcctggctaatttttgtatttttagtagagacggggtttcaccatgttggccaggctggtctcgaacttctgatctcaagatccacccaccttggcctcccaaagtgctgggattacaggcgtgagccaccgcgcctggccctatttttaaaattttacacaagtaatacatgctcttagtaaaaagaaatacaaacaaaacagaattgtgtacatttgtaacagtgcaggaggaagagggaagaattagggtacctggtgcacttgaaacaggagaaccccaaaatagctaacaggtatttgcaagaaagttcaaccaggctgagagcagcaatagaaataggaaagggttatgctctctgcagtactgagtgagtacaaaggatctgagagatttggagcagtccagcccctatgaactcaaaagactggcccaacaagccttccttttgggacagggcttcatactcaggaaaaatgactgggagtggaatcaaaattgagcagtatagggacatggatacaaaggaaagagatggtccagacaaaagtaggggaggagaatggagactggaattcctaagaagcaaggctcacataaaaatgagcaacagaaagtatcaagcaaggtcaaatccactgcagaaagtgtcaagcaaggtcaaataacacaaagttattattaggaaaaaggagaataaagggagaaataacacccctgtggacagtgaaagcacaccagtaaatcactacttcaaaacaagctcaaagagaataagaaaatgatacaagacttgaaagatgaaaatcagagtttttaaggctcataaataaggtgacagaaagaatgagaaataaaagaaaaattcattctagaaatgaggatgcaactagaagcaacacaggggatactaactgaagaaaaatagaagttacaaagaggaaaaaaatttaaattaaaaggaaatgaggctgggcgcagtggctcacgcctgtaatcccagcactttaagaggccgaggtgagcggatcacctgaggtcaggagttcaagaccagcctggccaacatggcaaaaccccgtctgtactaaaattacaaaaattagctgggtatggtggcacatgcctttaatcccagctactttggaggctgaggcatgagaatcgcttgaacccgggaggcagaggtggcagtaagctgagatcacaccactgcactccagcctcggggatagagtgagactaggtctcctaaataaataaaaggaaatggaaaagatataaaaagaatttgagaaacagtaacaagtatttaagacaaagaagattgaatgtatgggcagcaggagtccctgaggaagaaaactaaaccaatggaatagaacaaatgataaaaatgaattcaagacaactttcttaaaataagagattctaaactatatttaaaagagtatcatgtggccaagaatatcaatctaaaaagtccaacactaagatatattctagttaaaggagaaattatttagacatgtagaaaaagaaagcatatgacttacaagggggaaaattagattatgttcagatttttcaacagcagtgctttctgctagaagaaaatggagtaacatatttagaattctcagggaaagaacaagccaaggattttgtgtccagaaaaactgactttcaagtagaaaaaacagacaaaacgttaccaatttataaggcttcggggtatattaacatgagcctttcttaaggaatctattagagaatgtgcttcagacaatcaaaatagctagacctaggtcatcataaggactgatggtgagcactaaatatatagttagctgtagagctaagactgaaggaaggctgaggaggagagagtatcggatgtaattcccatgcactgtcaattggatacgataaaactttaaggggagcaggactgcatgcaaaaaaataatttaatgcattcagaaattagtattagtattgttattctgaaactgttgtctgagatatgtggtaaaaacaaataagtaattacggaatagtctaattctgtcattttctatacctttgaaatctgtattcttggtgtggaagaaaggagataacaaatataatagtatcaaatgtaatgaaaaagcagtatagtcttggatttgaattttcaaattgaaagtattaatatgaactcagaaggcgtctctcaccacaccccccattctcttcatctatccatctatttgtctcctagttctgttcactgaaaagactagatacaatcatctaccccagcagcactgagcatccttagcgtccagattgtgaacttgaaatatcatttctcaccaaaagaaaccagagtttcttggagaaatggctgaatccaggtctagatatgaaatgtgaagagcttgaaggacccatcttgtaatactggtcagcaaggaagttatcaaagcatagtaggaggatatcagaaattctcagaagccaacccgaagaggcttacattggccaaagagaggacagtttgaacttcaagaatgataatgtgccatgaattaaaactcaataaatatttgtaaatttatgactcaataatgatttaataatgtatttaacaagaataatttaccttaagaagatcctaagaaaccagttcattaccttgaaaacaggtaaagggaaagaatcaggcatttattatgccttttgtatatgagctgtacaactggatagccaactagtatatcctcattagaagcacctctttataaaattattacagctaataaatgacaaagacatagtaggattagaacatcactattttcaactccccataaatgaataaatataggcgttaagcatcaatgactgccaagatcacaaaaagacagctacattttgtgtgtttcctgtagtcttgccaaagagatccaccgtcagcttgatccattctttggatgtagctgcgtatttgcaggaaatacagaatatagagggaaatgttgaaccgcaccatgagaatgcaatcagcaaaatccagactgggaaactccacaggtcacatggcctgggtctttcaacagaaaagaaaatgaaaaggatggagaggggactgtggattaaaggaaacctaaaagacatttcagcagtgagatttccgaccatgcctgagttgagatgagcaaattcttccctcaagggcagaattgacagaataaccatttcagtgctctggaaattaaccaaaggtatataacatctgagaatcatttatgcctgaaaagctgctgagcttcagatatgaagcagaagtctgttgcattctttcctgggcattttcctatcccccaacacttcagcttggtaatgtggagggacaggttgtaaatattagcagtcttaactgctgtcactgaagggggcttacttgctttgggagtgggaagtcatgcctgtgcccagcagctttgtcagtggaaatgacaattctggccacagaagagcaggtatgaccagccactctattatcctgaactcgtggtcatggccagggcaagtatattcttggctgaggctatgcacatgtgtcgcggagaccagggtgggcccgagtcagctgcaaactcctgactagccctcaaactgcatgcacgtatagagaatatgcagaaaggccctgtgaaatgttaaagttgaggaagactttaaaatggtctgaactttgaatgcatttttgtgctgacagattgtcagagaaaggaagccttactgacttgaggtgtttgagcacaacttccgtcccatcattggctgactactgtgctacaaagatgcaggtgcaatccgtaaaaagccaggcttaaagataaaaacgaattttttaaaaacccaactgagcagaaccatcaggggctgcacaacaagggaagacagatttttctgaattagcctatgccggttactaaataaagatagaaacaacaaccttcagggggaaaatcagagccagagtagctacaatgtattatctgaatgtccattttcacctaaatttgagacattaaaaaataacaggaaagtattgtctcaccctcaagaaaagaggcagtcagtaggaactatctctgatccagctgttggattcatttagcagacaaaggcttcaaagcagcaattacgttcaaagaactgaagaactaaaggaaaacgtggaaatgaatcaacagacagacactctccaaaaaacaatagaaattacaaaaaagaggaaaattgaaattctagaaaagtatgacaattgatgtgaaaagttcaataactggccggccacagtggctcacacgtgtaatcccagcactttgggaggccgaggcctgtggatcacctgaggtagagagttcgagacccacctggccaacatgatgaaaccccgtctctgctgaaaatacaaaaaattagctggacatgatggcaggcgcctataatcccagctatgtgggaggctgaagcaggagaatcccttgaagccgggaggcagaggttacagtgagacgaaattgcgccattatactccagcctgggaaacaagagtgaaactctgtcacagaaaaaaaaaggaaagttcaataactaaggctgggagcggtggctcacggctgtaatcccagctctttgggaggctgaggtgggcggatcacccgaggttagaagttggagaccagtctggccaacatgacgaaaccccgtctctactaaaaatgcagaaattagctgggcgtggtggcagatgcctgtaatcccagttattggggagtctgaggcaggagaataacttgaacccgggaagtggaggctgcagtgagccaagaccacgccactgcactccagcctgggcaacagagtgaggccttgtctcaaaacaaaaacaaaacctgaaaagttcaataactaaaatgaaaaatttaccacagggtcttaatagcagattcaagatagcagaagacagagtcagtgaagttgaagattaatcaatagaaattattcaatctgaagaatatggaacaaaaagattgaaaaaaaataacaaagtttcagagacttatggaacaagaccaagtttaccaatatgtgtgtcatgggagtcttagaaggaggatcatgagagaaaggtacagaaaaatatttgaagaataaaagccaaacacttgccaaatttggtgaaaagcaatagtctacacaatcaaaagctcaacacacctcaagtagggtaaatacaaagagatctacacccagacacatcatagttaacctacggaagccaaacacagagataaaaccttgaaagcagcaagagaaaagcaactcatcatggataggggagcatagatataaataacagcagacttgtaattgaaaacaatggaggttagaaggcagtggaatattcaaaatgccgcaagaaaaaattcaacccaaaattctatattcagcaaaactatcatttaaaaatgaaggtgaaataatgactttttcaaataaacaaagactgagagaattcattgctactagacctaccttagaagaaatactaaatgaagactttcaggatgaaatgaaatgacaaaaggtggtaactttaatatatggaaagaaatgaagagcatcaaaaatggtaaatatgtaggttaatttagaagaccacataaatctatttttcttcttttctctcaagtttaaaagatataagattgtataaagtaataattataactctattattgggcttataacatattataatgtatgtgacagtaatagcacagaagaggagaaagggaattgagctatatttgtgtaaagtttctatattctgccattagaagttgattatgataaattaatttggagattttaatccctacaacaaccacatagaaaattacttttggatgcatacagtggctcagccctgtaatcccagcaccgtgagaggcttgaggccaggagtttgagaccagactgagtaacatagcaagaccctgtctctacaaaaaaataaaaacttagctgcatttggtggtgcgtgtctatagtcccagctacttggaggctgaggcaaaagaatcccctgagcccaggagttcaaggttacagtgagctgtgatcacgtgactgtacttcagcctgggtgagagtgagaccttatctctaataataaaagaaaaaaaagaaaattttaattactattattatgtaataatactcttttcagttagctctctcaggttgaaaagaaaatttacttttaaaaaatagtaaaggtcagacatggtgactcacgcttgtaatcccagcactttgagaggctgaggcaggacgatcacttgagcccagaagttcgagacgagctcaggcaacatagtaagacctcatctctaccgccccaccaaaaaaaaaaatacacgtatatatatatatgaaactgggtgtagggatgcacacctgtggttccagcaagttgggaggctgagctgggacgatcgcttgagcccagaaggtgaaggctacagtgagctatgatcatgccatttcactctagcttgggcaacagagtgagatcttgtctcaaacaaacaaaaatatttaaaaaaaatcaatagggggcatttaaacactaaaatttatttactccacatgaaagaaggtattaaagttgggacagagaaataaaaaagaaggtaagcttttttacttttttttttttttttgagacaaggatctcactgtattgcccaggctggagtactgcggtgtgattgtggctcactgtagcctcaacctcttcggcataagtgatcctcccacctcagccttccatgtagctaggcctacaggcgggtaccaccatgcctggctaatttttaaaattttttgtagagatgggattttgctatgttgccctgtctggttttggactcctgccctcaagagatcttcctgccttggccttccaaagtagtgagtttacaggcataagccactgtgcccagctggaaacatttatttttgttttatcatttcttctttattggttagaatatttttgtataaagatgcttccagggccaggcacagtggctcatgcctgtaatcccagcactttgggaggccaaggcaggtggatcacctgaggtcaggagtttgagaccatcctggccaacatggtgaaacctcatctctactaaaaatgtaaaaatagccgggcatggtggtgggcacctgtaatcccagctattcaggagactgaggcaggagaatcacttgaactcgggaggtggaggttgcagtgagccaagatcacgccactgcactccagcctgggtgacagagcgagactccatctcaaaaaaaaaaagaaaagaaaaaagaaaagaaaatgaataaagatgctttccccatcaaacatgtggtttccctgaggtataataaacataggaaaggcaggttgcagtttgatttttctaccttttatttactagttttcaaagtagtaaattgattgccttagtgtcctccttttttgaccagttaggattttatttatttttaaatatcattttgaactcatggatttaattatatttgagcctttaagtccactgcagttattattctttttgattctcatcttgtttgttctgtcttcaggttgagtcttgagtccttttgatgtgatccttgacataatttttgttactctttaaaatgattaacttgaagccctattttaattggaatatattacagctggaaagtgattttctttaagcagtactgggttaattattattcagtgttgaaatgtgattggatgtgaatggtgttgagctgttttttcttcataggtatgggaggtatcgccagcatgccaccgcttacagctgttgctccagtgccaatgggatccattccagttgttggaatgtctccaaccctagtatcttctgttcccacagcagctgtgccccccctggctaacggggctccccctgttatacaacctctgcctgcatttgctcatcctggtatgtgacttgctgaaaccataggctgagtttttactacttgtattttgctgttcattattaaaatattttctcttcacgttctgattatgtttaaatgatattttagtccagaggaaaatatctttatttttttcacttgatttcacattttttccactgtattaaatgggatatgttagtgtggagagagtcaaagagaattatagatttctgggtaccactgtggacaaaggtgagctcagcagtgaaagccacaaatgtaattttctttcaagggctgagaagagcaattgaagttgaactgtagttgaacattttctatttttatgtatcagttactacttttctttagccactatgaattgctaataagcaagccaatcccctaggaatagaactatgttgggggttgtgggaaagaataaaaaagaacagtttatactattttatggtattacatgcctgcttaattgaaggaaaggatttaaaagtttctggtttaattaattccactttgagactttattaagtcttttttcctttagttaaagtataaaactgtagatgtagatagccttggtctaacatcttaatgaattcatatcaatatggaaagtattatttttaaagtactttgactacatctaagtaaattcagtattgacgacatgggttttagcatcatacttgaaacatttctgcgcctttggccccctgaatttgttgtatatttatcaggatatatatttaagttatggccaaataagctaaatgtatctcctttttttagattttttcttgtcacatgtagttcatcttgcatatatgaccatgactgtggacatgatggtagcccagaaagtgtgtgcagttgtttttccaggagcataagcaaatccacacactctgagtcttctattcttttgtgactaatggcacatgttgcaagtcatttgccatcaggcaagagtgagggaatgtggctaagacgcagtgttttttttctgacactcaactaaccaaccccagtgataatcagacacaaaagctgaccttccctagtgtcacatgttatctggccaagactacagtttgtgacttcttggctcttacatctggaactaatacttcagctccttcagtgcagtgaataaaataccattttatatatttaagctgttacctctttaactgttggaataggtcctataaaatgtgatacaaaatgtttaatgaagagtaaaattttatggaaatcagcattactacatagtaaggtgattttcagtagaacaagtaaatctagaaacctttttggcaggaggacagagggtaaggagggaaaagctcttttcagtctaggctggcaagaagggggaattatttctgcctcagatttgttgactgtgcattttaatttttgtaaattggggaaagtttcttatctttgtagaattaaaattattcaacatttatttttacagcagccacattgccaaagagttcttcctttagtagatctggtccagggtcacaactaaacactaaattacaaaaggcacagtcatttgatgtggccaggtaagtttgcttgtttttaaatgggaagtttggttaaggccattacctgattaaatcataaatttgaccatgaatcatctatattctttttgttgttgtcatcttttttgtaggcttttgtagagtgctaataataattttcttaatttctggatagtgtcactagtttttatcattaatttgttgcagagatgagagaaatcaaggacataacatttccttaaaggctttgtgtatttttttttttttaaagaggataacaaatggatagtaataaaatgtttaaaaacagtaagataaaattctgggtataagggaaaaaagcaaatgaactattttatgtgtttatgatttacaagtttatgtataaaatttttgtatgaagattggagttatagttggccttatttttaattctatctcagataatcttgtggagtttatatgggtaattagtaaaatcctattaaagacgatttattatgaaaagaattatccagatagtggacaattcacattaatcaaatgtgtggctcaattttattaaagctgacatgacattattgcttatgttttggccaaccttggtttcaattattacctttcatatttttattttactcctatgttttacccttgcatactgctacattaagaagagaaattaagtctcttttaagccatctcagaacttttgggccgggtgtggtggctcacacctgtaatcccagcactctgagaggctgaggcaggaggatcgcttgagctcatgagtttgagaccagcctgggcaacatagggagaccttgtcgatacaaaaatttaaaaatgagatgggaggatggctggagccagggagatcgaggctgcagtaagctgtgattgtgccactgcactcttgcctgggtgagcctgcctaaaaaaaaaaaaaaagcttttggaatttatcctgtcttatgtcaatcctcactagaaattgttaagtgaatcaagtcattttcccactttcaagagaaaagcatgttgaatataattcagtgatgccttcattaccttttaaaaatgatttaaagaaaatccataaactgaaaagcactgtgccaaaagctttacattaactcattcttccccatgagatgattctgttactctctgttatagatgagggacaagctcagagacattatgttactcgtgcaacagaacgtaactcataagtgacagagctgagtcaaactgagatgtctgattttaaggcgtgtgttcttaactatgcaagttttctctaaaaaacttaattgtaggatacaggtatttatttgtgttccatttaattgcggttttacccttaagatgcctcaatatgtattgggcatctactttgccaggcacatcattaatcctattcaaccccatagctacctatgcagtagatgtctcaagatggtgcatgaggaagcacacccagagaagctctagtcctcacccatagtttacagcttagtgcatggtggagctgagagttaaacctatatcatcttacactaagttcctttttaaaaaaaattctcctgggctgggtgcagtggctcacgcctgtaatcccagcactttggtaggccaaggtgggcagatcacaaggtcaggagttcgagaccagcctggccaacatggtgaaaccccgtctctactaaaaatacaaaaaattagctgggcgtggtggcgggcacctgtaatcccagctactcgggaggctgaggcaagagaattgcttgaatccaggaggtggaggttgcagtgagctgagatcgcggcattgcattccagcctgggtgacacggcaagtctctttcttaaaaaaaaaaaaaaaaaaaaaaaaaaaattctcctataccatgctgaagttttgagtttattatgactttgcagaagcaattttgaaatctgctttattgatttgtgacattagaatgaactatcagtattagtgaacattagtgctattgaaacaactgttttatgttgtcacctttttaataacttaaatttctagccaatttttgcaatgcagtattgaacttttgggtacatcttcatgagtttttagtctatttaaattctcaggaatttggcagaaaactctgatgtgataagtgtaatctgggacaacttgtgtatgtaacacccaacattcctggcgtgtagcaactagatagttagcttcttgacaaataggtgggagttggaatcagcaaaatattagttagttaacatgagagggttggtgcagaagtacccacagcagaatagatcatggtaagtgttttttattaagaaattcataaaaattgaaaaaggtgaattcatataagtacttctcgagtgtttgggaggtatttcctatacttgaactgtatataatagatataagtgcatagataacacatggaaatgatgattaaaaagttcagtatttcagtaagattgtgcttttacatgtttgaatagatatttttgttgaagtgaaattgcagacagagcattagctgtaatctgtcctggaaggggaatgccagttttactgtctgagctcagccattgggtttaattcagatgtcgaagcttaacaagccattggtaccagtgtgatatttgtgtggacagtggcatctgaggaactaatcactaaggaagtgtagacgcagcctaactactggcaagtgtgtccttgggccagctcaggattgtggcacattggcaaggagagatcagtattggattgtagtcgagaaagtgaagctgtctccattcccactctgcttatgtgtgaccatggaaatgttctgttctctctctctctgggaaactgtccaatgggtctgaatttaaacttaccagaatggagtaatttcacttcattaagaaatgggtcctgtatattcacgtatagaaagttaaaacattttggagaattagtacctttaaaggcagttattggtttgcttttagcattgctttttaaccaaaaaagaagtgttttagaaattagaatagcctggacattattgttttacctcagttacaagaggtttttcatacttttatagaacctttaaattattatatatacaacttgaaacagcctctcagtctattgtgtttatccatgattctggaaaaataattatctatttgagggaaatgtttatgatcttaaaaatgggaaatacccatggcaaaaaaaatcagaagtagtgataataaaatgaataaaatatgaaagttagagatgattatctagagaagttcttagtttactgtcattaaggaactttaccaggctgttccttatggataatcctctttctctcctttttcttttccccacagtgtcccaccagtggcagagtgggctgttcctcagtcatcaagactgaaatacaggcaattattcaatagtcatgacaaaactatgagtggacacttaacaggtatttacaaataaaaattagtgaaatatgatctttgttttcaatgtaaactgtttctagatattgggtcatagatattttccatgtctgtgtgcttatttcttggcagtgtttcctttgtctctgttatctcatgttcttatccactgataactctttacatagttatatcattctctcatgccccattgctttgtggtaaaatggaatatagaccagggatactcctgtacgctgaaagccactgatatgcaaatcaaggcactagcaaagaaacacttctttgaacaaaaactagcttcaacttctgaagtccagctttgaacttgatgaacttgaagctgtctgttcactaggttagagttggaggcagcaggcagggtaaaagcagggagttgagaacatggctctgtctcagataactgcctagatagggctcaccactttggatatttctttatctattaatataaaaggccagagttaacttaggtgatctcaatggatttttttaaaagaagaatgattctgttatctacgtcagaaggatagacaggaattttagcatactgttcaaaatttttctcacgaaggtttaaatacttgttagaaagttataaagaaggctgggtgcagtggctcacgcctgtaatcccaatcccagccctttgggaggctgaggcgggtggatcacctgaggtcaggagttcaagaccagcctggccaacatggtctctactaaaaatacaaaaattagccgggtgtggtggtgggcacctgtaatcccagctactgaggcaggagaattgctggaacctgggaggcggttgcagtgagtcaagatcatgccactgcactccatcctgggctgcagagtgagactccgtctcaaaaaaaaaaaaaaaaaaaagaaagttataaagaaaagcataactttaatgaaagaaaatagagacctctgatatgaatattaaatgttaaagggaaaaactaactgccctctaacaaatatgaaaggaagggaaaaaaattaggtttcctgtgtggtggagtggggtaaggggaggattataatccaaaacacttttaagaaatgattcttactattttttccttgctattacttaaaattgcaatttttactcccaaaagaaaaaaggtatcttatgtttaaaaatgtcagagttggacgagattttgaagggttctaatctaatcttgaactctggtccctttaaggatctcagcagtcaccccaaataagcatgtatttatgtttgaatgggtgaatagtaaatacacacagattctcgatgtgtcatactgcctcataaagcagtagctgtcaaaaccagcctaccttatgcaggctctgcttttttttttgagatggagcttcactcttgttgcccaggccggagtgcaatggtgtgatctcagctcactgcaatctccacctcctgggttcaagtgagtctcctgcctcagcctcccaagtagctgggattacaggcatgtaccaccacgcccggctaattttgtatttttagtagaaacagggtttcaccatgttgctcaggctggtctcaaactcctgacctcaggtgatccacccacctcagcctcccaaagtgctgggattacaggcatgagccaccacacccggcccactgaaggtatatttaatagcatatttttaagtactgttttacatggtttgtttgacaccagtgctccatacaaacccagaactacattgccaatgaatccaaaaatatttcttgaaaacgttggtgtttgctgtgagttgattaaaatagtattcaattgagacattgattgagaaattctctctttcttggtgggatgtgtgttttatgaatgaaatgcagtatctacattccaaatataatgacccaggcacttgagcatttagaacttttaaatatctgaggcagaaagtaaaatttgaaatatactggaaagaaagcagattttgatattgtttatctgcatacttattgctactttgatccagcaagaatttaaggtgggaattttacttttgagccagacctttgtatagtcatgtcaagtagaataatttattacagtaaattttaaaatgggaataaacaatagaaatttaattttttttccctttatgtacttaggaatcaatatgaagtatgttttatactaaattagaatgttgatggaaacagctgatttgttgaggtggatggaacataaaggtcattgtcttgatcacaattataaaaataattttatgaagtcagaatccccaaagcagttcactcagctgcaggagaagcaaaatatcaagaaagttgagaaaaggtttcagtatataacatggcccaaaagaaatatataatttatatttgtaatctcttgtttttcatccttcttgcttttgttttttgtgggtttttgttttcaggagctaaaaagcacttcttttctttctttttttgaaacagagacttgctttgttacccaggctggagtgctgtggtgcgatagtagctcactgcagccttgaactcctgggctcaagcaatcctctcaccttagcctcctgagtagcagggactacaggcgtgcatgcaccaccacacctggctaatttttttaaaaaagttttctttagaggtgggatctttgttgtccaggctggttttgaactcctgacctcaagcagtcctaccaccttgtcctcccaaagtactgggattacaggcacccaggctgaagtacagtgacataatcatggttcactgctgcctggatttcccaggctcgggggatcctcccacctcagcccccaagtagctgcgactacaggcatgtgccaccatgcccagctaattttttgtagaaactgggttttgccatgttccccaggctggtctcgaactcctgagcttaagcgatctgcttacctctgcctcccaaagtggtgggattataggcgtgagccaccgcgtctggccttaatagtggcactgtttaccccactgactatctgggttgatttagccgatacatcctgttggacaccctgttcttccttcatggcttgatgtgtaactgttgcatgcccttaaaagagactgccttataaaatagagagggatcattctttaattaaggttatgtaagaagctctagaactctggtattcctgttaataatgctagcccttcttctcaaagaggtattttattgttgcattctgaaacaatgaatatgctatttggtaattcatctattaatcagaaaagctaaagtcttagtcattgttttaaataaagctcatttcatgtagttactctctcctttctagccatacttccctgcccaaacatggatgccagaagtggggtttgtgtgcttgggatttctggttttattcctatgttcccttataagccagtactccaaaaccgatatccctttatgtacctaggtttccacagaagagttctgtgcactcaaagctcaactgtgtgttgtccaaatgtgctaagatgctatcttagctgttgctgatctatttttaatattttgcaacattgatttaggacatatgtagacaaatagtagaattacaagagataattgtgatcttctagtgtggggattggcaaacattttctgtaaagaatagcacaataaatattttaggctcataggtcatatgttctctgctgcaactactcaactttgccatcgtagcatgacaacaaccatatatcatgcttatatcagtggatatggctgttttaataaaactttgcttaccaaaacaggcagtgggccagatctggcctaagggctataatttaccaatccctgttgtagattattttcctcatttcacagatggaagaacttcattttagaaagttaaagtagttttgttaatgtcacatgccattagggagtcaggactagaatccaagtcccctgatatccaggtttagagctagttcttcacatttattgttaggctttttatgtgtaatagataaaatattaacttccttttttatagttctggagtaagggcaattgttacaagtgtaaattaaatcacccactaaagttttgttaattctactttgttaccaacattctagatacaatgttacagactaaagaaagtgatgcctgaactttgctcattccattgtaccacagtcctttagaatcttcacatgaattcagtagattgttttttattcttagatgctcccaaaacacacacgtgctcatgtatgcacacacatccagcaggaatgtgttcatatattcaccaaaagttagaatgctcactattaatagtagccctaattgaagactaactgaatgcctatcaacagtataatggacaggccgggcacagtgactcatacctgtaatcccagcactttgggaggccaaggcgggtggatcacgtgaggtcaggagttcgagaccagcttggccaacatggggaaaccctgtctctactaaaaaaaatagaaaaattagccaggtgtggtggcgcatgcctgtagtcccagctattcaggaggctgaggcagaagaatcattgaacccgggtggaggaggttgcagggagccaagatggcgccactgcactccagcctgggtgacagagcgagaccgagactccatctcaaaaaaaaaaaagaaaagaaaagaaaacagtagaatggacaatgaattaggatgtaatgacacaatgatacactccatagcagtgaggattaatgttctacaactctacacgacaatatattgagcaaaataagccaggtggaacagcggacaggctatttggttagaagttaggctaccttggtggtagctgagtctaaaagagaggcaaataggggcatctggggtgcgattatactctctttcatgacctccatagtgtttgagtattttcactttggaaaattaattcagctgtgtacatgtgcacatgtatatatccacatgtatccgtatgtgtgcttttctgtcaggattttatatgtaaataaaagttgaactattgtcagtaatgttacctgccattagagcacctctcatgtgctaatgtgatgctaagctcattgccccaatggatcatagactggtttatctgaaatgagcaaactaggatccagactacctggcccagtcactcagcaaagtctagactaagccaggactagagcctacagctccttggttccctgacctctactgctggccatgcaaaaacacatccagttttgtggtttttgatgaggtgacgtttgaataaagaaatagcaaaaagcaaaaacatatacaccagaatcttcccaacaaaattgccacagccttccattcctctgtccagcagtcttcctgggaccacatcttgagaggcagtgctggaaaggaagacgtatttatttctccctctctgactgtagtttatttaaactgagtctcctactgtgcgtttgtctgatgtctaaggccactttcataccagaagtgaagatgtttatgattattttaagaaatgagagcttattttgagagaagagtagaaattccaggaattcttcttttttttttttttcttggctaacataggaaatgtgttttgttttgtttttttaattgagacagtgtctcactctgttgcccaggatggagtgcagtggcataatcttggctcactgcagcctccgcctctggggctcaagcgatcctcctacttcagcatcccgagtaactgtgaccacaggctcatgccaccattcccagctaattttttgcacttttggtggagatggggttttgccatctggtcttgaactcctgagctcgagccatctgcctgcctcagcctcccagaatgctgggattacaggcacgagtgaccacaccaggctggaaatgtgttttaatcctggctattagcgcttcctgcaactttttttttttttctttttaagtctgtttagtgaaacagtttcccggagatctctccgaggtcccttcctcctctaagattctccgaatcttccctgaatttgcctgaggttgagcagggtggagacagcaggtggtagcagcggcaaaagatgttaaacttaaagagaataactttcaagtttgtaaataaagcccaatacaaataaagatggtaatgtggacaaaaggtcaggttatattttgaaactctaaatctttcacatggtcattctttatcaaacatccatttaacaaaaatttattatgtgtcagatgctgtgctctgtgtttctcctctttttcattggggcttaatttcctttttacaaagccctgcggtagtagcaaatgttatttaaagcattgtgattgcatgaggtcatggagtagtccacatacgcagaaccctggtcctcctgtacagtgagtatttgctgactcatctgtatgtccttttcctggttcctgtttaggtccccaagcaagaactattcttatgcagtcaagtttaccacaggctcagctggcttcaatatggtaaggaatgaaaagttctttggtttggataaagtggaaacttggttagattggtgtggcctcatgggttttagattaataccgttttttatgggggaatatgtagaatttgcttaatttcagtgagttgtaatgattgcctcttttataatactatttcccctctcaattttgaaaaatacaaaagcagattaatacaataaattctgaaggagtgataatacaacttaacaattctcaactcgtgaccagtcttggctctccctgtctttgatttctttttctttttttttttttgagatggagttttactctagttgcccaggctggagtgcagtggtacgatctcggctcaccgcaacctccacctcccgggttcaagcgattctcctgcctcagcctcctgagtagctgggattataggcatgcaccaccatgcccggctaattttgaatttttagtaggacagggtttctccatgttggtcaggctggtcttgaactcccaacctcagatgatccacccgcctcagcctcccaaagtgctggaattacaggcgtgagccaccatgcccagcctctttgattattttaagccaaatcttagttattatataatttctactgcaaatattttagcttttatcttcaaaagagagggattttcctttttttcattcattattattattattacttttgagatggagtctcactctttcatccagatggcagtggtgccatcttggctcactgcaacctccacttcccaggttcagcctattctcctgcctcagcctccttagtagctgggactgcaggcatgaacccccacgcttggctaatttttgtttttttagtagagacagggtgttgccatgttggccaggctggtctcgagctcctgacctcaggtgacctgcccacctcagcctcccaaaatgctgagattccgggggtgagcactgcgcctgaccgactttcttcttagcacagtcataacagcaatagctcacctaagtttttcagtagtcatccttatcattaaattaatcagggaatgttcacattccttagagtgcctcagaatgtttttatagttcatttgttcagctcaggactgaaataagcctgtattttgcaatacttgagttttccatcttttatgtctcctttaatctataaatttccccttgtcttgttctctgcttcttttcccaagtcccccaggccgccccccaaccaaaaaaaaaaaaaaaaaaaaaaaactccgttaaaaacaaaccagatcatttgtcctgtagtttcttaatggcttaacttttgaagagtgcgtcactgtgggattgtctaatttgtttctgtatttcctgtaaattgataattagatctagagcaaagtttcccaaccccagcactattgacattttgggcccgataaatctttgttgttgggggatgtcctgtatactgtaggatgttcagtagcatctgtggccactactcactggatgctagatgccagtagcatgagctccacacccagcatgacaatcagaaatgtctccagactttgatagatgtgccttggggtacaaaatcttccctggttgagaattgcggatcagatttgatttttttttttgttttgttgttttgtttttgataagactgtgccagagaggtctctgtgtactctcctcaaaaggcacataatgtctctattgtgtaatgattttgaatagctatcgatgagcattgcctgggtcctacaggcttccttaaatttaaatgttaactagaatggtttcttaagaagtgtgcatgttatagctgtatgttggtgattgtccctggaaaataaactttgtctacaagactcactgcaaagttcgtgattttcttgcaggccacattgatagggttgtttcacaaatgatcaagctctaatgcagcttcctttgcccttctcttcccttctgttttgtatgaaagagcttgcctttggcagtagaccagaccagttaataaacatcttatatctttgacacacccagaactctttaaatcagggtattgaacagtatcctagggccccctgaaatataaacttaagatctaacattaatggaggttggttgacaatttattaggttgttctcatgataccagattatattgaaatatttattttaaatttctcatttataacttatcctatttgagaaaaacgcttgaggcttcttctgttagaatgttatattctggtgctacacactaaaaaagatattttaattaaatgcttataatcataatttaggtaagtgtggtgaaaaaacaagaatttcagccaccttctaactggtttacctaggactggctaattgtgagacacaaaaaggaacagaataaggaagagcgggcaggggtttcattttatttcatttgcatttctttttaaaactgggtatcttgcatatgggtatcttgcaaaactagaggaacagaaaaaagatcagcagttgccaggggatgggggcaaaggagggagttgctacaatcagatgtggaattttaggtagagctgacactattctgtatgttgtggttcatgtttgtcaaaactctcagacctatactctagaaggtgtgcattctactttatggaaattataacaaaaaaagtttatagcacctaaggaaatttcagaattaagaaggtttcttaatttttggcattggcaaaaccagtttcccattgcatttgtcctgttgacattctagtgaatggatgtgttgtcatgtatcttcttttgatggtccagaaattgtttagtaaaatcacattcttggacttgccaggagaatgtttgctgtaattagctacttgggcaagttcattatgaagaatgatggagattgaatcctgagattgaggaagaggaaacacttagactctgtggctggagttcataaagatccactgtgtaggcctagattaaggggtggccagctctgcccagtgggccgaatctggcctgcatctgtttttgtgaagaaagtttttatcgtacaaatagccatgcccattcatttatatgttgtctatggctactttctgccaaaatgacagaattcagtatgataaggattgtatgtcttataaactgtaaaatatttactacctgaccctttactgatagtttgtcatttcctggtctagagcagaacatttaacaatatagagctgggtatggtggcttatgcctataatcccagcgatttgataggctcacttgaggccaggacagatcagcctgggcaacacagtgagacccccatctctacaaaatattttaaaaattagctaggcatggtggcgcacaccttgtaatctcacgtttgggaggctgaggcaggaggatcatttaagcccggaaaggctgtggtgaactatgatcttgactgcagtgaggctgcagtgaactgtgatcatgactgcagtgagtctgcagtgagctgtgatcatgactgcagtgaggctgcagtgaactgtgatcatgtcattgcacatcagcctgggtaacagtgagagctcatctgttaaaaaagattcatggaatatgagtgtattatatgttaaatatgcaaaggttggggaagagtatcattataatcatagcatttgttgaatgaggaacactgtcccaactacctgtaattttatctttgcagcagtataaaataggtactattttgacaaaatgagggacaaagagactcagttggcctgtggtcaataagaaaacataacttttaaatcactaatgaatagtaaaaagcatgaattttcatgaaaccggattacagttaactttttgttgaataggaatctttctgacattgatcaagatggaaaacttacagcagaggaatttatcctggcaatgcacctcattgatgtagctatgtctggccaaccactgccacctgtcctgcctccagaatacattccaccttcttttaggtaaggaacatgggctctgatcaggaattgtatgcggagtatatgaattccaaacttggctttattgactatgtgtcttacctgattttcatccctgacaaggaaactaagtatccgtgaattctagagactctcatctaggtctatgttaatcttgggcccattttgttcttcaaagtacttgaagtatattagtgaaacaatgaagtaaaacatcaatagattgttgattttctaccaacctatgtcatcaatgcttaccagaaattttcacaacagatgccagcagcaagagagaaactgcatgagcctatgcatagagaagaaaccaaggagatcacacttgtgaattccacacatttcagtggtaacaaaagctgctagcaatgtagaaattataatcaggaagacaaagaaaattaccctggactgaaagacagtctcagtaaagatgtcaagagagtcacctgaggtccagtattgtgactggcatcctcatttacatccatgcatgcatgcacacgctgtccaggacagctctgtctcctggctttgaacataaaaactgaatatgagatcttacaagtacaaaggagaatgaaagaaagattaagatttctgacctgagtcctcaaactgcaggaaggactggggcaaaatcccctttaaatgaagagaaatagagccattactgtcagcacacacgtggtacaggagcaagctgaggaaactgtgactatgtaggaagcaacagatagctgaggcactttgcctgtgaaatcccacaactgcaacattggaagctgataatgaatgcgtaaaaaggattgggagacggtttaaacacagcaaagttaaaagtgtaaagtggggagggtggtgcggtggctcacgcctgtaatcccagcacgttgggaggccgaggcgggtggatcacttgaggtcaggagtttgagatcagcctggccaacatggtgaaaccccgtctctactaaaaatacaaaaattagccaggcgtggtggcaggtgcctgtaatcccagctactcgggaggctgaggcaggagaatcgcttgagcccaggaggcggaggttgcagtgagccaagattgcaccattgcactccagcctgggggacaagagtgagactttgtctcaaaaaataaaataaaataaaatgacataaataaataaataaataaaagtgtaaagtggaagaaattagtaaacaaagtgatttgttttacgaactatatagacattgcatgtgtttcttagggggtgaaatggagagatgggaaagggaagagagatgctcctagtgagctgagctgctgatcttcccttggaggaatttaaggttacttgagagggcaatggaaatagcagctcccacttagtgctcaccatgtcccaggcattgttcttaccactttttgattattaactactttcatcctttggaattgtttcaattttggtggtgattcttaagcttggcactcagagtctgatgacattccaatattcattaaaaaactctttgtaaatagagaagaccaaatctttatattttccttactgtaaatgaaatttgctccatggcatggtaaaatctttaaaaatccttcttcataacttgtccaactccacccagacagctctgtgtgaatctatttttctttttccccgcaattgcagaagagttcgatctggcagtggtatatctgtcataagctcaacatctgtagatcagaggctaccagaggaaccagttttagaagatgaacaacaacaattagaaaagaaattacctggtaaggcagcctttatgttgagttaaatcatttagattaaacgaaattagagatttcctatctctaagacaaagatagaggtaaacataaatttagtttttgacatttttgccttgtaacttaactgaccttagttggagataattgttaattaagcttgtggatttgggtctggatagagaaataagaacattatgcactctgctaatgcaccgttgttctaacttgtaacttgaaatctgattataaactgctaaacaaaaattatgtaaatgttatccatagaatatacagcactaaaaactgatgagtattaaggtgattgcttaataccaccagtgcagaaatagaaaatcaaatcatctactgttgttttctcatgttgttataagagaattggaaactccttaattgcaggaacctattttaaatttaatgtgaacctattttattttatttattttgttttttgagatggagtctcactctgttacccaggcaggagtggagtggcgcaatctaggctcactgcaacctccgcctcccaggttcaagtgattctcctgcctcagcctctggagtagttgggactacaggcacatgcaccacgcccggctaatttttgtatttttagtagagatggggtttcaccatgttggccaggctgatctcaaactcctgacctcaagtgatccacctacctcagcctcccaaagtgctgggattataggcgtgagtcactgtgcccagctgaacctattttaaataatactcatttacaatgataaatccatcatactattaaaatattctaaggtggctatgaattattaatgatgagatgataatgatactaagaagcaaatgaaattatggagtcttttatgataaatactttgtcagtgtcattttgctgcatttaagatgctcagcagttaattggtctggtcagaacactggctgtcccagtttattgtctaaactaaattaccttttgttcactgatgaaatactattggaaatattttacgtgcaagcctgcatgttgagcaaagaatctaaatgttaatacatggttcatactttctagaacctttaaaatatattagaggatttaagacatccatataagcaatcacttcagcagtatgtgagtgggataaattcctggagagtattatagatgcacaacagacctcacttatggttggttggtgtagactggggaagatatgaggaattaaatgtctgtggaagaggtcacagttgagttgagagttgaagatgaatagggtcaccacaagtggaagtgagaatagttcaggttttgataacaatgagaatgaaatttcaatggcagataaggacaggaatgcttggaatgcagaattttctttttctgtttttagtagacattcatttaaaattttgaacaggaagcaacattatcagagatttcatttgtgcattcattccttcaacagccgtttattatatgcctcctacatactaggaatattgccagatgctggaattaaaaagatgtatagagacttggagagttttttaaattgagatgagattcacataatacaaaatgtacagttcagaggctgtcttagtctgcttggactaccataacaaaatagcatagaccgggcagcttgaacagtgggaattttatctctcaccgttctggaggctggaagtccaagatcacggtgtgcagatttggttcccagtgagggccctcttcgtagcatgcagacagcagccttcagtttttttgctcacatgggatttccttggtttgtgcatgcagagggagacagatctctcctctctctgttttctctatctctgtctctgccttttttttttttgagacggttgtttcgctcttgttgcccaggctggagtgcaatggcgtaatctcggctcactgcagcctccgcctcctgggttctagcgattctcctgcctcaacctcccaagtagctgggactaaaggcatgtgccaccacacccagctaattttgtatttttagtagagacggaggtttcaccatgttggtcaggctggtcttgaacttttgactttaggtgatccacccaccttggcctcccaaaaagtgttgggattacaggtgtgagccactgcgctcggcagtccctgtctttttataaggatattaatttatcataagggccccactctcaacggctaattttttttgttttattttgtttttgagatggagttttgctcttgttgcccaggctggagtgcagtggcgcgatcttggctcaccacaacctccgcctcccgggttcaagcgattcttctgcctcagcctcccgagtagctgggactacaggcatgtgccataatacccaggtaattttttatttttagtagagatagggtttctccatgttggtcaggctggtcttgaactcctgacctctggtgatctgcctgcctcggcctcccaaagtgctgggattacaggcgtgagccaccgtgcctggccagctaatctaatcttaaccttccagaggctccatctccaaatatcacattagggtaattagggcttaaacatatggattttggtgaggcgacacaaacattcagttcctaacaatgacatttagtgcattcacagtgccttgcagccacaacctctcttgtcccaagatactttcctcacctcacaacaaaactccatatccatcactccctccagcccctggcaaccaccaatctgctttctgattcttgggatttacctgttgtggatatttcatataaatggaatcatatatgactgtttatgactgacatctttcacttggcacaatatttttgagattcatccaccttgcagcatgtatcattacatcatccctttctgtgggagggggactttgaatttttttttttttttttttgagacagagtctgctcgtcacccaggctggagtgcagtggcgcaatcttgtctcactgcaacctctgcctctcagctttaagcgattctcctgtctcagcctcccaagtagctggggttaaaggtgcctgccaccacacctggctaatttttttgtatttttagtagagactgggtttcaccatgttggccaggctggtatggaactcctgacctcaagtgatctgcccacctcagcctcccaaagtgctgggattacaggtgtgagccactgcacccagccaggactttgaattttaagatatcagagtagaggataccatctcctctgaaatcaccaaaggtgagcaagaaaaccaaaacatacttgcccgctttcatctctaatcgctgactacagtacgtgaaggaagtctgtctaaagcagtgaagtccaaacaggaatgtgggaagaagccaaagatggatgctcacagctgcagatctcaaggcagagtgagaagcaatggttcttagatgtggaccagggactggcatgctgcacagggtggcaatgagtgctcccctggccggcgttggtaccaaggaggattgcgtgaggccaacacagaaatgaaatagacactgctgaggacagtaagggacaaggatgatgggattgtagaaaatgaagaaataaaatggacataaagtattagaaaaaaaaggatagaactgagtaatcattctaaatttataattgatgtgttaaagaaggaaactgaataatgggttagaaaaaattgttgactgactgtgatctccatagggatcagggcacagcttgttcttcagtgtgaaaagccgaatgctcacctttcactctgctttgagaaatcttgttagaatagaggactcatcagcacggttacaaggcaaagggaaggagggagagagacagagactcatggtccagaagagagggggttaattcctagggcaagctcatgggaagaagggaaaggatggagtaacagggaaggaaaggagtctggatggtgatgtagaactgctagataaggatcttttagaaacagtgtttggcgtggaggagaagatataaacagagaggttaggcaaagggggttttcgttgtgctcattaacaaggacacagaagcttagggagttctgggtttgggtttgtactacaaatttcaaatacattggtgagttttcctttgaaaagagtccgttgaaaatcttgagttttcatagttgctgtgttccttgtctgaagtaacgtttgaagataagaagcgggagaactttgaacgtggcaacctggaactggagaaacgaaggcaagctctcctggaacagcagcgcaaggagcaggagcgcctggcccagctggagcgggcggagcaggagaggaaggagcgtgagcgccaggagcaagagcgcaaaagacaactggaactggagaagcaactggaaaagcagcgggagctagaacggcagagagaggaggagaggaggaaagaaattgagaggcgagaggtaagcaggcgagagtggagccacccggagttagtgtgcgatcaccccttttcagaattatccaagtgatctattcacgccatctttgtctttttacaattcagtagttttagtatattcccaaagttgtgcaaccatcgtccctaattccagaacattttcatcactccagctctttacccattaagcagctactccccatttctttctccctccagctcctatcattaattttactttctatctttctagatttacttattcaggacattttttataaatggaatcatcaatatatggacttttgtttctggctttcatttagcataatgttttcaaggttcatccacattgtaaaatgaatcagtcctttattcctgtttatggctgagtaatatttcgttatatgggtataccacattttttaattcattcagcagttgatggtcattgtggctattataaacaatgatgttatgaacattaatgtacaagtttttgatgatacaattttgtaacaaaccactgataccagtaaagtgtttttccagactgttttctctgtatacacctatataaaaatataaaggtttatatggcggagagtgtaagggctgtataattttttaaaaaccactgtaatagtatcataccaattacattgttctgcaatcttcttttttttttttttttttgtttgagacagagtctcgctctgtcacttccaggctggaatgcagtggcatgatctcagctcactgcaacctctgcctcctgggttcaagcgattctcctgcctcagtctcctgagtagctgggattacaggtgcccgccaccacgcccagctaatattttgtatttttagtagagatgaggtttcaccatgttggtcaggctgatctcgagctcctgacctcgggtgatccacccgcctcagcctcccaaagtgctgggattacaggcatgagccaccgcgcctggcccatgcaaccttctttttaaactcttttaaaaatatgtctgggacatcctccctatattctatggaaggcttcgtaaatttagcgccatacctggaaaggggctaagcaaatcttgtctctctttccaattttagtacattactgcagaagcaacacatggttctttcatgtgaatgaaagataaaaatgaggaatttttcgatgtaaaaaaatagcctgagtgctgtgcctcaagcctgtaatcccagcactttgggaggctaaggagggatgatcacttgaggccagtagttggaggccactgcattccagcctaggtgacagagcaagaacctgtctcaaaaaaagaaagaaacaaaacttatagccataactcctttttttttttttgagacagactctcgctctgttgcccaggctggagtgcagtggcacgatctcagttcactgcagccttcacctcctgggttcaagtgattcacctgcctcagcctccggagtagctgggattacaggcgtgagccaccatgcctggctgatttttgtatttttagtagagacagggtttcgccatgttgcccaggctggtctcgaactcctgacctcaggtgatccgcctgcctcggcctaccaaagtgctaggattacaagcgtgagccactgcgcccggccccgtaactcctttttgttcagacagacactaacaaaattttaattttcagaatgaacaaagataggcaaacttttcttcaacgtaccaaaaaaatgatattctagagtatttattcagaattatttaatagacatttaccatgtatcaggtgtagttggatgacccatgagtcagaggcaattcccatagactgtcagatgctctgatatgtactctatctagcagtcgtcagagccagtcgttggagggagcaaaagcttttgtggtaaaaaggaaatgaatgattaggaagtggggagtcgcagacttttaaaacgagttaagtaataatttctcttttggtggagtaaaatcaactcttgtttgtttttgttcaggggtgttttagtttgattttactacataaattttccttcttggcgtgtcagtaaataagaaggagcatttttagttagcacatcaagcattcttgaaggcataaagaatggaattctaatggggaaataatcctgtcatcttacgtaaatatagtattatgtaaatataatacccagttctgtgtattccctttattcccatagaaggaatactgtatttttatgtaattttttgttttctaatgtgatttcttgtaatgtttaatatttcatccctaaaaggaaagacttcctagatgccatttttgtgaaaagacattgtgtagtgtaagaactgaaaaattagtaatttgtctctgtaaatgtcacaggctgcaaaacgggaacttgaaaggcaacgacaacttgagtgggaacggaatcgaaggcaagaactactaaatcaaagaaacaaagaacaagaggacatagttgtactgaaagcaaagaaaaagactttggaatttgaattagaagctctagtgagtgaagtttggttatactttgaaaatatactaagatggaaccattaaaaacagtaataatttttattatctttcatttgttcaagaatgataaaaagcatcaactagaagggaaacttcaagatatcagatgtcgattgaccacccaaaggcaagaaattgagagcacaaacaaatctagagagttgagaattgccgaaatcacccatctacagcaacaattacaggtgaggaaatatgcctcttaaaagctattatattaaactggcatccttttctctaattcatttcatttacttacttattcagtaaacattaagcaactgtcttgtactaggcactgggaagcaaaaatgaagtagacagggtccttgtgtgaaaagtagcctgtcaaggagacaaactcagcaaatatttactgagcactgcttcgggccaggtgcttttgcagtttctgaggctacagcagggacagacactctgtcttctgggagcttaccctctgtttgcaggaggaacagagactaacaaaataaagtgtgtactgtattagaagatgaaaagtgctatggagagtgagtagggaagggaatagagagtcctagggataggaaatgttgtgattttaactaaggtagccaagacaggtctttctggatggtgacatttgagcagagacttgaaattaatgacaggctaagccatgtgggtatctggcagagcaagatctaggcagggaaatagtgccaaagtcctgaggtcgtagcaggactctgagatgccagttacagcaaggagactactgggtagagcaggtgggagctggatcacacagaacctgtagtccaccaacaggactttggctttactgtggtaattacaataaataagtacacttaagtattttagggggtcatatgagagctatatgtatactaaatagttggagacatacagagcacttttagtagttctgtcttcattttaaagcctatccaaagttgttataatatcacctggtttggtatcaagtgctgaactacaggggcatcaaattcatgtaaatattgcctgtggatgatcatatttgcctgtgattcctttatgttaggctttttctcagcatgatgtttttgagatgtgtccatgttactgagtgaatgactcttttgtttcttttcatcactgagtagtgtttccttatgtgtccattcacctactggttgatattcaggttctttccagtgtggaacttttatgaataaaactgcagtgagcatttatgtacaagtctttatgtggaaatggtttatttctcttgggtaaacttttaggaatggaactactgtgtcatgtaagtgtatatttaaccccataagaaactgtcaggctgggcacagtgggtcacacctgtaaacccaatactttgagagggcaaggtaagaggattgcttgagctcaggagtttgagaccagcctgggaaacatagcaagaccccatctctaaaaaaaaaaaaaaaaaacttaaaaattagctggcatgggggcgttcacctgtagtacctgcctgaggcaggaagaccacttgagcccacgatatcgaggctgcagtgagctatgattgagccactgactgcctgggccacagaatgagaccctgttcaaaaaaaaaaaaaaaaagagagagaaaagagaaaggaaagaaagagaactgacaaactgcaaagagtttgtaccattttacattctgatcatttaatttgtatttccctgaaggctaatgatgttgggaatcatcttacatgtttattggcgagtattttttactgtgcatcttcgttgaagtgtctgaacaaatcttttgcccattttttattgggctgtttgtcttactatttacttgtaaaagttctttttatattcttaacaagtcctttgtcagatacgtgttttgcaaatattttctcccaatctggcttgggtttaatttttgttagtggtattttttaaagggcagaagttttaaattttgatgaagttcagtttaccgttttttttcttttggtgttcatgctttttatgttctatctgagaaatctttgactaccccatgactgcaaatattttattttcttctagaagtttttggggcttaaaaaaataatttttacaagtttttataaattgaaaaaaacttaaaattttaagtttcatagttgtatcttatatgtttaggtctatgagctatttcaagttgatttttgcagatagtataaggtaaaggttgaggtttatatttttacatactgatacacagttgttatagcaccatttattaaaaacactggcttttttcccattgagttaccttggtagcttgttgaaaatcagttgaacatatttgtaatggtctattctggactctattctgttcttttgatctgtctgtcctttaccagtacctcaccctgttgatacctaatttttgaagtcaagtgatacgaattctctgttattgttctttttagaattgtttttggttattccaggtccttaacatttccatgtacattttagaatcagcttatcagtttttacaaaaatgcttggaattttgttggaattccattgaatttataaatcaatttgggaagatttgacatctcagcaatagtaaatctatggcataaatctctattttggtagttataaatttctctcagcaatgttttgtagtttgcagtgtccaagtcttgtagatactttgtaaagtttatccctaagtattttgtggcttttgatgctattgtatattgcatatttttattttagtttccagttgtttggtgccagtatatggaaatagaatttatttttgtatattgaccttatatctgtgattgcttaactaacttcctttgtgtgtcttactttgttgaccagaacctcccatactatattggatagaagtgggaagagccttgttccctctcgatgaaggaaagctctctcaccatagagtatagtgttaaccagggttcttgtaaacaccttttatcaggttgatggacttctccttttgctgagggtttttatgatgaatgggtgttgaaatagatcatatgttttttccccgcatctattgagataagtatgtgttttttctttcttattttgttaatatgatgaagtacatggttgccatttgaatgttaaatcagccttccattcttgggataaaccactcttggtcatggtatattaccctttattaaaatatttcactacattccatttcccattattttattaaggatctttttaaatctgttgaattcaattcaacagagatattggtttttagtgttcttctaatattcttgtctagttttgatatcagggtaatgctggcctcagaaaatgagttggaaaatattccttcctcctctattttctaaaagtgtttgtgttgaaatagcatttcttctttaaattttggtggcattcaccagtgaaggcctctgggcctggagctttcttgaagacttaattataaaattcattatgcagatatagggctattctgattttcttcttctccttgaatctgttttgattatctgtcaatgaacttgtttatattatctaaattattaaatttacttgtataaagttgtttataatattctctttttttttttttttttttttttttgagacggagtctcgctctgtcgcccaggctggagtgcagtggcgcaatctcggctcactgcaagctccgcctcccgggttcacgccattctcctgcctcagcctcccaagtagctgggactacaggcgcccgccactacgcccggctaattttttgtatttttagtagagacggggtttcaccgttttagccgggatggtctcgatctcctgacctcgtgatccgcccgcctcggcctcccaaagtgctgggattacaggcgtgagccaccgcgcccggcctataatattctcttattgtatgtaagtctgtagtatctgtagtgatgtctcttctttctttactgatattggtaatttgtgtcctctcactctgtctccgtgcttccttctccttttccttcctaaccccttcttctctcctttctcctactctatctctcctccttcttcttttcttgatcagtctatctggagtttgtttatttttaaaaaataagttcttggctctattgatttttttttttttagtaagcccttggctttattgattttctctgtggtatgtctgttttctgctttatttttgttctttttctcttgtttcttccatttacttatttggggtttaattttcttttctcaagcttcataaggaggaagtttagataattgattttggacctttcatcatttttgatacaaacattttaagctttaaatgtccatctaaacactgacattgccatatcccacaaatttttaatatgttgcattttcatatttattcaattcaaaatcttttttaaattttctttgtaatttcttctaattctttcacctttattgagatttatggctcagcatatgctctgtcttggggaatattctatgggcgcttgaaaagaatgtgcatgctgttgtaattaggtagagtgttccctaaatatcagttagatcaagttgattcatggtggtcttcaagtctcctgtgtcttgactgattttgtgactacttttattagctactgagagtggaacactgaaatcctgatcattgtggatttgtatatcttcctttcatttctgttcaattattgtttcatgtactttgaagtcctaagaaactccttatacatttgaaatttgagatttgtaaaggaaaaagtaccagaagttgattgctggaaattattttaaaatattacaaaatgcatgcacctttttaaagtatatttttcttttcttttttttttgagacaaagtctcactgttgcccaggctagaatgcagtggtgcgatctcggctcactgcaacctctgcttcccgagttcgagtgattctcctgcctcagcctccccggtagcagggattacaggcaagcgccaccacgcctggctaatttttatattttttgcagagatggggtttcaccatgttggccagcctggtctcaaactcctgacctcaggtgatctgcccaccttggcctaagtgtatttttctatgtgttaactctctttatgtgtcttttgttaactcttgaggtaaagtttcataaaatattctcctggaaaatttagggatgaaggccatgtgtttattaaactaagtattatcacctaatactatatgaccaagtacaatttttattaaagattgatgtttagactgttcacttattgataatatgataaaaatcaagattcccaaaaatgtaatgaagtgaaaaataaaacattctttgaagaaagaaaagtatgtagtaggtaatcagatattggttccctttctgtacagggattagcagatacttgctttggagataagtcagatctgatttgtgtattctgttttatcaagatttttttttctggtatggattattcataggagaagatgcttctaaattctagctattgagttaactctttctaccatttagacatgcattacacagagatttattccacataagccagtctgtatctaaaggtggttattccaaaatggactggtttttagcttctgatgaaaaattttaattaaggcatttttagtttttcaaacaaaaagtcaatacatagagctcattttttatcaaggtaaaaataaaagtcaaatattctttattataacctaggaaggctgccattttactgaaacatgcagaaactatacaggatattttcggctaaatttaagcagatactgttcttggcaagttaaccacaaaaattccaaacagcctgtgcagtgtggcttaacttttttcttgtgtcagttaaaaaaatagttgcttcaaaacttttgtgtacctgtttaaaattccatccagtgtggtggaaaaatatatacagcagctaagattctagttgttaaaaatctttgatttctgtttctaacttcaggtatacggtaaacctaagttcagccttagtaagtatcaaagttcaggatagagtaatagggtagctcctatttagaccactgagttagtttacaaacagtaggatcactgcatttgcatttgatcccggtgccattggaagatcattgcttcaatttatctctgtggagtagtacttaatgtacattttttgaagcttataaatatccggtaagtcaacaaaaatataagaaatatcagggaagctataactgtgtagggaaaagcatttggcaaacagagttaatttcttggaaagaaagcaggagccacacctaattaataattaaatgcagcttcaccatgcaggatttgggaagagtctgagaaaactgacttaagctctgcctggatcttaatgtagatgtggtagccttccctgtcattcattactattttcctccttccttcccaggaatctcagcaaatgcttggaagacttattccagaaaaacagatactcaatgaccaattaaaacaagttcagcagaacagtttgcacagtaggtgttttatttttaaagttgaccttttctttattctttctttttttgacatggagtctcactctgtcccccaggctggagtgcagtggcgcaatctcggccaactgtaacctccgcctcccgggttcaagattctcttgcctcagcctcccaagtagctgggactacaggtgcatgccaccacagccagctagtttttgtatttttagtagagatggggtttcactatattggccaggctggtctcgaactcctgaccccaggtgatccatccactttggttccccaaagtgctgggattacaggtgtaggccaccgcacccagccttttcttattttttaaccagcaagaatttccttaagtgaaatgagaacattaaaaaacattttcctcactgcaaattaaagtttttcttatctttgcgacgtttttctaaaataggagattcacttgttacacttaaaagagccttagaagcaaaagaactagctcggcagcacctacgagaccaactggatgaagtggagaaagaaactagatcaaaactacaggagattgatattttcaataatcagctgaaggtaactcttctatgtgtgcctgcatgtgtgtcctacctttaatttttttaactgtccaaatgattagttgctatttaatcacaggcagaaaaatttattatgccattgtgagacaatctaaattgcacttttctccttgaaaatataagaatgaatttggcatctataaattagggctgaatgagtggccccagcatgacatctatttttaacctgaatcatattttgacacatctccattcttttgtctgtttatagtcacatcaagttgattccaaaagctttatctttcttatgttctttgaatactactaaaagggattgttttcttttttaaaactaagaatttttctgccacttcttatcttcattgcgcttaaatgtagatctttattttgttacctcatttttaaatcttactgttttagtggagtaattgcttttgtctcttgtggcagaagtggtgtatggttttgtcacatttgcacagtaaaattgggaaaatgccaaaactctgaggaaatgtaaaatggttagatcacagcctttttcagatttggtgtttctgatttaactttacaactgtatcatcttaagaatgttaattcttggccgggcgtggtggctcatgcctgtaatcccagccctttgggaggccgaggcaggcggatcatgaggtcaggagatcgagaccatcctggctaacacggtgaaaccccgtctctactaaaaatacaaaaaattagccgggcatggtggtgggcgcctgtagtcccagctacttgggaggctgaggcaggagaatgatgtgaacccaggaggcggagcttgcagtaagccaagatcacgccactgcactccagcctgggtgacagagcaagactctgtctcaaaaaaaaaaggaatgttaattcttaaaatcagaacacaaacagtttatttcttataaacaatcatatactactttagatgtatgtagatattagcatttttgttattcttataagaaattggatgttatacttttttcccctccaaatatttgttttccttttctaacataaaattctttttaagccaattcagcttttgacagtgggaagaagtaaaactcctattctataattctaaaaacaaaattaaaaattagcatatttgaaacttttataatagttgacctttggattgagattctaggccaaattgtctagacatctgagtttgaggtatgtgtgctgttctttcagagtattaggtaatgatcttttctcaattgtacgattccaggaaagtgctcttaggggaaatattatttgagccaacttagtgtttttcttcactttgctttcatgcttacatggtgtgtgtttgtgtgtacactatatatgttctatattcatgcatatatgattatgtgtggtatgtcagtattggaagtacagctgtaaattaaccatctctagaataagtgcaattagaaacaaaaaaacaaaaaagaataagttcaattaaagtatgctcacattaactttcattgtcacttgtctcttttataagcaaaaaaaaaaaaaaaatagcactgttgcaaagcctatgttgctttttaatagtctcttgggatataaactgttaaatattaagctctcttctgaacccaggcagtagtccagatttgtgccttcacattgattctttttctagaaatttgactcccctaaaaaaggttcaggtattagaaaatgatactctagtgagaggcttttgataaatgtctagaagattaaataattttggtgattgaatttctgttgccattactaaagagaacacccttaatatgtggcgagtcacccctactttgtttaattgactatggctgctttcagtatcacagagtttcttacataaaggccaattttagcccccttttccactagccctttttccaaatatgcttatttttaaataagagtatttcttcttgttttttaattttaattttggctttctcttattaactttaattaatatgatgagtttaaaaaaaatcacaggtcaggtcgggtgtggtggcatgtgcctgtaatcccagcactttgggaggcaggtggatcacttgagcaagtggatcattcgagactagcctgggcaaaagggtgaagccctgtctctacaaaacacacacacacacacacacacacacacacacacacacacacactagtcaggtatggtggcatgtgcctgtagtcccagctacttgggaagctgaggtcagagaatcacttgagtctgggaggttggggctgcagtgagccatgattgtgtcactgcactcctgcctgggcaacagagtgagaccctgtctcaaaaaacaaacaaacaaaacagtaaacaaatcacaggtcagtataactatattgttttgttatttaacacgcatttggaggacttagtgaatatgttgtgttatggttattatctctagtattcctctcaaacctgataaagccaaaacaaacaattaaattggagaatcaaaagatttatagaatttgattgagacaactcagagatggatttatcatttagtctcttaagtgtcacttgcccacttttctttgttgtagccacactggaaaatgaaatactttttttgtaactttagagcatgtgtccattagcaaccatgttttcttggatgaagagataggccaggaggagccagtctcctgactcttggggtttcttcagtgcccctcttgatcggcagtgcctttagagcatccacgctgttgatgcaaaaattacttctgccttcctgggatgtgtcatttcacacatctaacctgatagtgtgaatttgttgtatcctaaaccttcctttccctaaaggaagccagctggagagtacagaaaagaaattagggcttcctgttcttttgtatttcatgttcacgtagattgttcacctggaagaaggaaatgcagttccctcattataggttagtactgtaacactggaggaataccttacagagtacagaattttaaaattagttgatcaggatactaaatctatattaagtggctggctccacaaatgaggataacatttaacaaaaattgattctcactattttgggtaaattgcaataagtcattcacctactttgatgcatgctcagagttatgtccagtttcttaggtataaaggtaatacagggaataatcgtaccctggttcagcccagattctgagttataagacagtgattaggaagtataggaagcgtatttagtcaaaaaactaaatacacttatactttccttttcttttaacatacaatctgatttagttctttctctagaatgtcttgctcagattaatttgtcttttgtgggtttctcccattttcttcagttcaggaagaattccttccttccctacccaaaatctgataagcaaagatagaaattctcaaagcattaattaaagaggaaaaagttacaggttaacaggtatttgtctcgtataggaagcaacctgttgaaaacataaggcatacttataatcgtgatcttctgttaaatggctccatattcaaagtcgtgggcctttaagtttctacctaatccatggaaattgaaggctcattttttgttttccaaaaaaggctgtttttccatgcgttttaatagatatttaccttttaggtgtcatatttatatattcaaaaaaagatcctaagatgtaaatatctttctatttaccacccaaaccaataattacttgagaaaggaaacaggaatcttactgtagcaaataaactttgcttttgggttttaaataagtctgtaaaaacagggagggtgggagaagaggagaaacgatagcaccctgaaatattgaagctcttatcctacaaattccccaattggcagcctttgtacttatgctgcccttgctatgcatgataaattttaggtttttgattatcaaatgaaatatttgaacagtgaattaaccaggaataattaattttgttgtgattattgctagcatgaattagtacatcttaaaatagttttaattcagtgggtaaaatttatttaccattaatttctgcttttaaaatgtgttctgtatgtaacaaataccttattaagaaatcggtagtcttctcagatccacgttctagaaacaacaatttaaaattattatctatgacttctacttcagtttacatgaaaattaaaactcccaacttttttggagactctgtgtaccaaaagggtagtttttcttacacacagtgcttacctataggcataaaattatgattcaaacaagtgttaaataacattactgctaggactttttggacagtagcacctgactttaccttgaccttggcgatgtcagtagttactgtagcagttttccttggcactgacagcctaatgttccatattttaatgtcttagctctaagatggagcagcagcacaaagtacagcttgtagttttccaggctcctttaagaggtcaaataaggagaatccaacacccaacggagctagattttatgtttcatgttgaaaagttgagtccttgttggttcctgtctagtcagtgtgtactggacaagtcctaatgtgaatggccgtttacatttgagcatttctttcttccagtcagtggcaatggaggaggcagtgttgcagtgcctggcagttctcctgggctgcgtcatccacttagacttctttctaaaggtctccatgccctactcaggcaatgcacatctttctcagactaagaatgatgaaccatctccagctctgtgcttcagtttcccctgcgcagatgagtgctcagtgtctaagatagcatttaccatgaagtactaagccttctttataaaagttaattactagttattattaatcgtggagtatgattgattctttcctattgacgagttgcgtgtgtgtatggtggtgtaaactgaattacaggctggacaaggtactgtatactgtagtcttgtctttttaacaagcattttagatcattgaatttgagcttgtctgcaaaaatgtgaaagcgctcagttgttatttgggtcatgtgcatgtttccatcatgggagacatactgtgatcagtatactattccaaatgtgtatagcattttattttctagcaaagtttgaatatttaagactaattcacaattatgatttaattccttagtatacttgggaaatccaggcttctaaaattagacacaagaggctgttagaaatataaattctccccataatgctacctgttctaaaaattgctcttagaaccgaatcgatgttgaaatgagaaggccagttgtagtaaatgaggttgtttgcttaactaaagcctttatactcttggtttcagacactagctttcatgggaggctcattcattatgaaggcagtgaaaggcaaaatgtttagcaaccagaggaaaaaagaaaagagctggagaaagaactgcagaacagagtaagaagtcagggaaaaaaatgcttgtgaagggaaacaatgaaggaaggagaaagactcagaaagaggaggcacagagacagtgagagaaatcagtatgaattcaaatagccatgttgctttgtcataattagtagaataatgtttggttctttcattctgttcaagctaaaattttatttttacctatatgatcctttggaaaagacctcttatgcacagaagtaataaagtgctctaactctcattctgtcagattctgtgccataccagtaggctgcttggttgagttttttagttacagcatgggttttttttctttttaaggttgtaaaaatttaataaaagataatttgggaaagggttaagaagaactcagtcttttgaaaaaatactttcttctcttaatggaatattgctttgtgactgaagcagacactttgagggaaattcagattttcaggacaaaatggaatcagttttctctttctggtaatgcttcccaagggtacttcccaaagcctcatggcagagggtgtctgattacctattactattgcagagaggacaagagcttctagctcttctgcccacctccttccacacacacaccttgctccaatctcccttagcacttgtgacacattgactaccattttgtgccatgggaaatagtcttattattttgttaaatactgacttcaaatttaaatttttgaacatgttttcaaacagtatatcccatttcagaatttaaataaccagtcaggccaggtgcagtggctcatgcctataatcctaacactttgggagttcgaggcgagtggatcacttgaggtcaggagtttgagaccagcctggccaacatggcaaaatcctgtctctactaaaaatacaaaaattggctgggtgtggtggcatgcacctgtaatcccagctgctcgggaggctgaggcaggagaatcacttgaacttcatcacggcagaggatgcagagagccaagatcatgccactgcatcccagcctgggcaacagagcaagactccatctcaaataaataaataaatgaataaccaatcagtatatatttttctgtatagtcctctcagttttaatgcatcgagaatgaataaatgtagcctggtacagtgacatatatctcaggaggctgaggtgggaggatcacatgaagccagacgttcaaggctatgatcgtgcctgtgagtagccgctgtactccagcctggacaacacatgtctctaaataaataaattttttaaatgaatgaataaatttataattttatgataaatgggctatcagtttaccttgatttgggtatagtttctgtgttctgaaatcgttatttttcaaaattttccatacaggcacaagttctcacctcatggggtttgttaactggccttctttaatagctcttcatttgtttcacaaccacttaatttgaaaaagttaatgtattttaaaactccaaaggccttctataaattttgataccgtatactacatattatccctaggtgagaaataatgtttatttacagaaaagcacttctactttggactttttatggatgtgatattatagataaacacctgaaatttctgatgctggtagctacatcattttttaatgaggtcaatttaatattaacagtatgaagattattataaatgttatatgtgagctaaataattttatcttgatttatggttttgagttcatgaaatttaagtaattaagttatgtttgtttttgtctctcatttccaagagacatcctgaggcgaaccaaaagcaaaatccttcaaaaaagttaaatatctaaatcagtaaatacatttccattaactgctggtctcctttcatagacccctgttgctatttttttctcttcatatacattatgcaaagtaatgtttgtgaaaaggaatcctatatattgttcaggcgcatgctactttatatttcaagtaatattgtttcacataatacatgtatttttgagtgtctctaagaccagatgaaggagaaacagtcacagttattaaatcaagtgattctgtgccttttagcttagcaatagaacaaacttcttcagtaaacctgagccacatttctcaggggaaaaatagttggattttcttgggtattcaatttgtcaaacagattgcttttgaaatactttggctctgtgccataggatgtccaaagatgttttatggttcaaatatcttagttctttaggggaaataagtgacttttccctctttggtctagggaagaaaattaaaagcaagttgattttcgtttatcttaactaatacaaaacagaatcttgatatgccagtaatttgttattgtggttcatgagctgtgcttgatcaaagaccccttgagactaataaaagctgtgagctttctccaccagaaaaatgcccatataccccaagtctgcatgcaacatagtatccacagggctgaagcttattcatggaacctggttaagaaactctgtattttcatgattctgcataaattgtgattttttaaaaaaaacttattttaatatttaatattaatatttaatatatgtgtgtagtatatatactacacattttatagttttattttttctgcataagtatttgttacatgcagctacaatttcttgactacttaataatttcttatttaagaaagtactgtaattatgttttattggaagataatatcaaattattacatactctacctagtgtaaaacatgtcatacacttgaatagaattcataaaagaaaaatcaacaaagttgtacactccgtactatattgctagattaatatccatccaagaaacaagtttttgtagaattactggttttagaaaaaaaaatcacttaactttaggaagaaccgagtgagatactgacttttgattcgtggtaatttgtttgttttctttctgttataatagcaaaataactgtgacaaattccatgtggatttaatagaatttgcagggtcatttaaatcaagttgcctaccaggaaatgttgatactttcagtgtggtgaaattttccttagccatttcccccaataatttgctcatttcctagatatgtaatttaatggcactagatttgtttgtcactttgaatttttttctttctgaaggagttaaaaggatacttcttaataactgtaactgtacttgagtctctttaatagtatggagaagaatgagagaatagtgtagccatctgctcccctatgtgaaaggactgggtattctacaaggactttgttctggcaaaggaaggagagtcattcactcatttttttaagagtatatatttcttcattctatagattgccttctcggaagttcaactttttaaaaagcttatcaacttagaaatcatccatgttctgcttatgttgattcatgccatagtaaactctttaagtccaagaaaagagaagacccagaatgcctgcctctgggcagcatgttgatttccttacaactgtgtatctcagcagtgtttgacttggatgaaggaaatgatagaaaaactttgccatcttgaaatctggatcataaggtgccagagccttctgttagcttatttgtcgtctgttattttatggttcctgcaagctccattccttggaggtgcttgaaactgcaacttacataatcagttcctaagatcggttcaaatactgctatactcaaaaacaagtgtgtttaaaaaatttaagtatcttttttcatgtatttgatacatttaaaaattatttttgaaactgtgtcataggtaggttttttttctgtagattcttcaaaatcactttttcttacaagcttttcaattttatagtctctcctaatgtattactagctttacttaaatccggtaatcaatgatctataaatccatatccagttacaagagcctagtatagaaaggaaatgtgcggtataattcttggggaaaaatgaaaaatcttcatttgtgcctatgggctatctattatagtatgttgatacatcatggccagtgtccattctggttgtgcagtacctgttgttgaatattttgaatatcactcatgaatacattttttcctggatgaaataaggacttttctttatttaatatataatcagattcctgaacatcaagctgaaatgttatttctcttccggcatttcttactcctttgtagggtttaatttcagctcagggttattttgcttatgcttttttcacttattcttgcagttaagaataaaattctaaataaaacagatactgaaataaataaatactttatttgtttgttagacattgtgatgaacaatgtctaagatttatcagatcccaaaactagaagaacacctaaagatcatccattctgattcatctgccagctcatatcagggacctgagattagaatcctggtttcttgattcccagttctgtaccttttttattttttatttttttgagaccgattcttgccttgtcacccaggctagagtgcagtggcgcgatcttggctcactgcaagctccgcctcctgggttctcgccattctcctgcctcagcctcccgagtagctgggactgcaggcgcctgccaccatgcccggctaattttttgtatttttagtagagacggggtttctccgtgttagccatggtggcgtaacttttaagtatagtcttttgctgtaaattattttttctgaacctatttaagaatttgatggtcttgaaaatgaaattttcattcatattattactgattatttattcttgattccaggttactatgaaaaccagtactactgattttttaacacattaaaattaagttttacatcccttggtatggcagtgagaaagatgatgaaaaatggacttctttctccctagggttgattttctgatctcagcactttaaacagtcagtgtgaggctgcatcattgctttccagtcttagccttcttttccccttccctctgttccacatgtcaggtctgctgccatagggaacagtccaatttgtgccttacaaaggtaccttttcctgctgtgtcctgcctggatgttcccagtgtcatctgctaggttccctactgaagccccttcttcctttctttttcctccttcccccttccttcctttccttttttccttcttcccttcttctccattttccccttccccttttcctccagtaccttcctcttcctaagtacctccccccagacccctatctccagttaaactttttcttttatctcattgttcttttaaagcctctcagcgtcacttacagtttataaaacatttgtgtatggattttaactttaaccttagcaaaattagtaggaaaaggttagcctaacccttaggatttttttccaataacaagtgcattttaatactgactttctacagacaaaccgtctacctttgttgttcaatctctgaatgaatctaaaggtaggaattttagggcctggaagaaacctacctgcccatctagtcttgccagtgagaaaggtgatagaagacgacagggcaaatcttagtccttaactctccccatagagatccctgggccatgtactgggaggaccagccctggttagatcaagaaatcagctggaaagataccttggctctactgggcactttgactcatctgatttatcgctggcccacataagacgagtttcagtgactcaatctattggtgaccatttgatttctatggaatcagggagtttcttcctcagcagacgtttccttattcttcctattttcaggtgtctaaacttgtgacttgagtactttaaatatcatagaatgcattttattttcagtagcctgctaaggaaattactgctattcctgcagctagtagtatcaagtgaggaaattggatccaaggtattcatcatcaaattatagctttttacttttaacctgattgctggtttagtttggggcagttagcgacttgaaggatagatttagtaagaaaagatgctctggaagaggagcaacttgaagaaaaatagaccctggggggaagaattgaggtcaaagaattgaggagcaaagagatgtccatttgttctaaggcagcttagtgaaaggtggaggtgaggtttgaatggaggtagtcagtgaagaagaggcatctgtattttcaaagccagtaaaggttggtgttgattgataatcaaaagaagcttaagttttattcatgatcatcgtcatatcttggaactggttacgttccattatgattgctgagcctttagcagcagagctcacctcctgcccttcgctagcaggtttcttctagagcagatcatggaaaatggtataatgtgtatggctcattagaatgtaatcttaagtggcctttggaaatcagtcatgtcaaaatgtggtgtgattctagctttccaagttgactttttccaactctgaaacgttatctcctaagtgtcctaggcttcccactatgaaatgttgcatgctgataaatagttgatgtacctgtcactcatgtcgctacatgaactgtttctcggttaattataggaactaagagaaatacacaataagcaacaactccagaagcaaaagtccatggaggctgaacgactgaaacagaaagaacaagaacgaaagatcatagaattagaaaaacaaaaagaagaagcccaaaggtgagtcttctttggattgtggactcatctggaaggaactttgaggatttactattctttgcttggcttctccaagtagttactgcaccagaaagagccttcagtctttagtgtgcatgtgaagtgtgagtgcaaacacaaacacgtgtatatatgaatctttgcatgtatcagtaccctctgaagtttttggttggttcccagagctctctcaagctactactatgtagataaatggaattatacaaggaaattgggacacttggtgtgctcatttgcatgctaatggccagttcacagccttttactaacagctaacaggggttggagtgcctggtttaaaatccaagccactgagctagtgccccacacagggcttctccagcagggtcagggtgggcctcttctgtttttcaactgcaaattaaactttagtacaaaagggggaaatttgccaccgctgcttagtgtgtaggatacagacatgtttttatctgtttttgtttgaagatttatttgtgatatttttatttttacttgtaacttactgtagtaaattgtagaaatttgtgtctgattttgttactgggtatttgccttttaaatgtcagttaattttagactccacgaaacaaaaatgaccaaatgtcccaatgacagccccgtaaattataaaagttggtaattgaaattagattaaggccaggcatggtggctcacacctgtaatcccagcactttgggaggccgaggtgggcggatcacgaggtcaagatattaggaccatcctggccaacatggtgaaaccctgttctattaaaaatgcaaaaaattagctgggcacggtggcacgcgcctgtagtcccagctacttgggaggctgaggcaggaggatcacttgaacccgggaggcggaggttgcagtgagctgagatcatgccactgcactccagcctggcaacagagcaagactctgtctcaagaaattagattaaaaaggcgaagaaacggatacttgaggcaagtcattgactttagtgggctgagttcagttaacctgccaagagctgtgcatactttcttatgggtatatagagtcttctgtttgtttttcagtgccagtggggaggtatctggggtcccagaccaatttacaggattgttttatggttttcttgggggtcagactaaggatctcctccttggatgttgattaactccatccttttcttacccccagagtttataaaatgcttttattattcacactataccacactgaactgttaaattcctacagtgtagaaataaacataaaatacagaaaaatacataaaatagcataatacagaaaatagcataaaaatataatatggaatatgtattccaattatatagataaaaactgcaaattaacgtcagaaattagatggttatacagtatatatggtgaccttcattggtagaaaatataaagtaattcttttttttttttttttaattttttattttttgagacggagtctcgctctgtcacccaggctggagtgcagtggcacgatctcggctcactgcaacctccgcctcccaggttcaaccgactctcctgcctcagcttcccaagtagctgggactacaggtgtgtgctaccacgcccagctaatttttatattattagtagagatggggtttcaccatgttggtctagaactcctggctggtctagaactcctgacctcgtgatctgccctcctcagcctcccaaagtgctgggattacaggcatgagccaccgcgcctggccactgtttttattatggtttttttgttgtcatgaataaccatatccttacccctccaaaaaatgtttttatactttcttaaaagacattttaaaaattgtaaataaaatgtttaagatttaagtttaaagacttctgcattaaaatatcacattcatacagagtagaaataaatgtaattttttgacaatggagaataaaagtataatttgtttcaattatgttcccgtggcagattcctaattctagccgatgacctgtgtgcgttagccatgtcacaggatggcagttcagggtggagactctgggaccaggctgcctgggattgaagcccatgcatgtatggctgtgtgacgtggacaagtcatttaatatctctgccccagcttcctcatttgtaaaataggagtaatactaggactaccaacctgattcgcagtttaaaggagttaatatatggggagctagttattattatgtcatttgttattacatattagtttcatttaaagtattttctgactttataaagtattatggaatgagaaaaatcattctcagtcttttactgtgggtttcaggttgaggccatcaaaaatttcaaggcctagatttaattacaattatctatttgtggtagctactttgaaaaacaaaatcaaagtagttgaagtcaataaaacaatcccttgctttcaacttcaggtttggggagcaatgtgtgtgcatgtaaatgtgttgttccctttgctggggggaaatttttacagtgttgggtgtattttatttttatagaagttatgttctctgtgttttatggctttgtttgtttgttttgtcagtttaataccagctttattattaagaagtatttttcttattcttgtaaccactttgtaaaatacatcagaaattttctgtgttttcctaaatcatgtgatttcttctcattcagaactggagccctgattcagttgccccatctgaacaacaatgttcccttgatgttcccatcccatttactggatggagctttttttgtgaaaagaggcaacagtagtgttaacttagagttgctttcttgctgtaatcaagcgtgtttgttggcagacgagctcaggaaagggacaagcagtggctggagcatgtgcagcaggaggacgagcatcagagaccaagaaaactccacgaagaggaaaaactgaaaagggaggagagtgtcaaaaagaaggatggcgaggaaaaaggcaaacaggaagcacaagacaagctgggtcggcttttccatcaacaccaagaaccagctaagccagctgtccaggcaccctggtccactgcaggtattagaagccaaaaataattatagaaaataagtcatcttctctcccagagcctcctgaaaaatgcccctatctcatcagtacctgtcttggctacattaacagatgagaacgtcagtctcttattttgagcatggccagctcttctttccccagggtcatttgagatctgtgtaattctcccaccaccatgccagcctctggcccacgttacactggcatccacgagtcctctacggagctaacaagtggcgtgaagttccagtggtcttatatgctgcaaaagaacctgctgtttctctggtttgttatttccctccctggaatttctgagctgtttctgcaacagaaagtggcacctttcacccttgcctccactgatggggcattcgctgtcttcggtctgcattgcataaaactgcttttactttttgaaaaatgtaaaagcataatttgccttttctttacttctcttttctttcttctctttccttttcttttttctttgagacagtgtctcactctgtcgcctaggctagagtgcagtggcacactcatagttaaatgcagcttcaaactcttgggttcaagcaatcctcctgtcttagcctctcaaggagctgagactataggcatgcaccaccatgcccagctaattttttttttttttgtagagatggggggtctcactttgttgtccaggttggtcttgaactcctggcctcaggcgatcctcccaccttggcctttcagagtactgaaattacaagcatgagccaccatgcctagcctaatttgccttttttttttaaaaaagggataaatgaaagactgaacaaaaagataaatgaaagaccaatctaatcggaatagctagaaaaagctatcctttataatatctgatgtgagctagaatgtatttaagattcttgtgtggttgtgtgattgtacagttttgcaaataatgttcagtggaagcaagtcattgctttttctttgtgtggtaaattataccagttttgcttggtcatccatgtgcttctttagtgcttcagtatacagaaagaaaagaaagaaaaaacactttcaagctattctgtaaaggtttactggtccccagctacatagtgggcagagatgggcgtgaggtatggagttgcattaggcacctacctgccttcagatgcatgcagtccaggggaaagactggcaggtcatcagacctacagagtagcaaccatgtcataggaggggcaaattaattttttgatagttttttttttaatctgaaaataatttcaccattgatcttaggaagttagtttaagttcttcatgcgtcctcctagtataagatgaggatttatttttccccttcagtcagtaggaaatcttgcatgtcatacagttcaaaatcatgtggagataatacttccccctcgttgcttttcagataagataggtatatgtcaaaatacttgtagctcttgagtaaaaatgcccaaaggtctgttactagtttttgctaaccagaatccaaaatatcctccgctcatgtgcatttttaaacattttatttcatgtaaaatctaaattattttcatctaggtttcatccttaggctaattatttcccaaagaaatgtagaggaagagtgtcttcatcggggattatcagtataaccaaaatcagcacttagtttttatatgaccaggttaaagagcctaaaacatctgcattttcatgtttcagtatggaaactggtgcctctgttccctcccaaacaagttgactccttggctgattcagactttgggtcatatcctaactgctacattgtactcaacacactgggtagggaggagggcgggtattgatgctttacagatctgcactgctggagcccaaggaaagaggcagagacaagggacctttaggcagcctcgccgcacccaggcttggagtgacctttgtttagagagagtcactaatgaactctctcatgggtttttgttgctgacgtcagatttggctgtgctttggcattcagtatgtgtttcagaaattccttgaatggagggaaatagttcagaggttaagataggcaatagaggagaggttagttgtttggcttgttgtcatacatttgtgttctctgtaattatttatttttgtcccccccacctttttttgtaaacagaaaaaggtccacttaccatttctgcacaggaaaatgtaaaagtggtgtattaccgggcactgtacccctttgaatccagaagccatgatgaaatcactatccagccaggagacatagtcatggtaagaaagactccagtgagagggtcatttctgttgaagattagcctctgtcctctttttttcactttattcaacaattgtgagattgtcagtgagtatgaaacccaataatccagcatctagatttttaaagtataagctcaatcttctttcttttctattaaaatgaaagatggcatttaaaaaaatgtatcctaacatcattttaaaattgagttgataaagacagtgtgttcttatttttaaatctataaatgtctgataatttcagagtttagattactacttatatactatgagtatacatatatatgtaatacatatattttatatatgatgtatagacaatatatatactagtgtgcgtgtgtatatatatgtgtatgtataatatatactagtgtgcgtgtgtgtatatatgtacacatatatatacacacacaaaaggatcctccaaggtggaaggaggccaggagtctttaagaaatagttataagtgcaaaacactctatcaaatcattctcataattgcaataacttttgtatctttgcatcaaagcatcttttttccctttaattatgtgaacttttaattatgtaaaaagagtaatgaattatacagttaatctgctttcctactttgtaacagaaaatagtttagaattttgctttgttattgtttctttccttgaactaataatcattttatgatgtgactaaaactataggaaccagtttaagaaagaaaatcagacatggttgatctaaatcattttctaaaagaaaatagtagttccttgttctagttactctctttagagtcttagaagtagtcaactctgcattactcttaacattttttttttttttaaagataatttagattttttttttgttgtggttgacacaagttctcactctgttgcccaggctggagtgcagtggtgtgatattggctcactgcaacctctgcctccctgcaacctctgcctccctgcaacctctgcctccctgcaacctctgcctcccgggctcaagcaaagcgattctcccacctcatcctcccaactagctggaaccacaggcgtgcaccaccatgcccagctaatttttgtaatttttatagagatagggtttctccgtgttgcccaggctggtcttgaattgcctgggctcaaacgatcctcccaggtcagcctcccaaagtgctgaaattacaggcatgagccaccatgcctggcctagaatttgtaaagaactgtgaaagttaacaattgaaacaaacatgtttcttacccaaggactgtatgtctttgaagtataaagggtggtgtacaggtgattttactattactcatgcattcatcttgccatatacacatcatatctgtggatctttaataggctaaaatacctagaaataacaatatgtttggcacttagagaaatgaattcctgtgtccccttttttcctaatagctgctttctctgtaattaccatgggctagaagaagcaaggccaaacatcccaaattattttttcttttttttgagacagggtctcactctgtcacctaggccagagtgcagtggcatgatcttggctcactgcagtttccacctcccaggctcaagtgatcctcctgcctcagcctcctgagtagctcagaggcgtgtgccaccacaccgagctaatttttatttttttacattttgtagagacagagtctccctatgttgcccaggctccagatctttaaaagttaaaatcaccttaacagtagcaaaaacctcttcaagtatactccatggcttcattcagcacacagttattgactgaaacatgctgggtgccagccttactcatcctttacagaaagaactgttggtttgggcatgccactctgtacacacaaatggtaacttgagccagcggggtgtgtttctgtcagctttcctctgacttcaccacctgctgtttcctacaccgtggtttctgatagcctgaagctactttactcatactgcctcatatttgaagtagtgtatcctgtaaagcagattaattgtaaaatatgtaaacaccatataataggaatctaaaatttctgaaaatacaatgtcacatcagtgaggacctcattacaattttttttttaatgttaaacaaaccagcctaatatttttgaaactggattttgttgcaacacaaggtgcagagaagcagctcgctctcatcctaaagtaagggaatgttatgaaatgtgatgatgaggaaatgttgcaggtgatctgtatcttaatgagaaagtgttgctctttttcgggaacatatctgggcttcacttgtaatcctaggcctgttgaaaccttttcctcgaattggctagttaaccaccagcttgatgagatgcgtagagtttagatatgctgtaagaataaagcatgtcattaaacatatattttgccttgctttcaaacctttgctttcctggtggaggttaaaggggaatgggtaagtgttgcctaactgtcaggaagtctgcatcttattcaatgttttgtccttttaagtcacttgaattctgtgtaagtacacgtatctctgggtgttgttgcggcagtaaaaatgtgtttgagtctgtgtagtaggttgtgctttttaaaaaaaaagtaagtcgtaagtcttctcagtttgtgtactgggtttctttttgttagattccttttaaggactaacttgaatgctctgtgtttggcaagggattaggtcaagtctccatctcaggccatagacaaaaaggagttccaagtagattaaacataaaagataaaattctgggaaaaaaatttttttaagcagactattggaataattttctggctaagaaaggccttttgaagctataaaaaccagaagtcgttaagaggcaaaaatggacagtcaacaatatgcaaaaattaaaatgtctatgtttcaaaatatatgagaccaagggttacataaagggttacccctgttacataaagattccgaacagttcactttgaaagacacccacaagccttaaacaattggcagagggtgggaagggacattcacagatgaagtaaaaagtcagttatttaaaaaatacatgaaaagatgcttagcttcttgggtgatcagaaaaatgcaagttataaaacaaaatagcattgttcctctgtcaaatgagcaagtttaaaagtctggtaatatccagctttgtcaagagtataggacagtggatataatatacattgttagcatggttgtataaattggttaagcgatttggaaggcaatttggcagtgcctgtttagatttaaaattctcgttccctctgccccagaaattctatttttctccttcctctcattcttctccttcctcttttgggcacatgcacaaatatgtgtgtacatggatgttcactgcagtggtgttggtaaaagcaaataaacagcccaatgtccatcagtaaagggatggcttaaataaattatgatacagctaaaaaatacaatgaagattaaaacttatgtagatcacatatacacataagatttccatcaaaaaagcagaatatgtgcagcataattgcattttggttcgaaataaaactatatatgtattcatgtgtttatgtatagttaacagttttgaaatatatatatcaaactgttaacaatggttaccactgggcagtaaagaaggggctttcgtgttgaattttatagacttctatgttattttcatttttataaatgtatctaatttgtaatttttaataaaacaaaataaattcaaggacaagtatattagagagtatctactcaggactgtaataatgtttattatatctcagacctcccaaatatgtaatgaaatgtagaatgtactactaggcataattcgttggcttgcagaagggacagcagtgtttcgattttgtactacaaaatgcattgtgatactccaggtgccattcagctgtgttatctttgtgaggataacagtcaatgcaaaaagatagatattgacatctaatagcaacaggtttgtatttttttaatttcatgaattttgcagttaacaaatgatgagcatgagacatgtagtacaacattactgtcagtctccctaggttgaaaaatccggggttcacttatacttttgtgggcacagtcatcagattctcagattcctcaaacgtctttgggacatagcttactataatatgttcgatttttagaagtctaacattgtgacagtgttttttaatgtaggcagtcttagccttaaaaatattttgtttttagaaaaacttagcctggttttatccaaaactataatttttcatgtttaacaaaaatttaatgtggtaccttgtatatagcactattctcagcactgtagataatagaaaattatcaagtctgccattcatatgtttaaaatctttttagaaaaatctagagaaacacatgaaaaggccaacatgtgatgaagttctcaataaacattcactaactctgctaggaatttaaaagaggagaggaatcagtgtaaagtgatgtgctcagggaagaccaaatgctttcaattgagtctgaccttgatggctaaggcttagatgcgtagaaaatacatggcctctcttgatctggaactcccaatacttggagggtgaattaaatcaaatttgacatccgtaacatgttagtagaacataagaaatgagaagacctatgctcactgctgttttgttgaagtttatcttgagaacacaggctgagtgtctaaatcagtacaatcttttggctttcatgggccacattgcaagaattgtcttaggctgcacataaaatacactaacactaataatagctgatgaacttcaaaaaaaagcttgcaaaaaaaactcataatgttttaagaaagcttacgaatttgtgttgggcctcattaaaagctgtcctgggccacatgcagccagtgggttgcgggttggacaagcttggtttaaatgcttatccttggactggtacaggcctgaatgcatccagattgctgagggagcttccaaaaaataaccatgccagggctcatccccagagattctgagaactctactgcatatacagccttcagaagtctgaccaggtggttctgttaggtagtcaatttcaggaaccgctgatctaacctaatctctttttcacgtcaggactaatcctaaatcatttctagaaaatatcctcttaaaaatatccaaagaagaatggacttctttagtagttatcagtcattagccagtcagttcattctggaaattgtttgtcttagtgttactcttataacaatttttaactcattcttttccttttcttctcctgacagacatttttttaaatgtagccaacaatacctttttcctctaccttccatagatttccatagattaaacatcagaaagtatctcatttagtaacaactggccataatatcactgcagttttgagggaccagtatacacgattacagggttggctcaaatctggcccaatcactgcctgttttataataaagttttattggaacacagccaggctccttcattcacatattgtgtgctacagtggcggatttgagtagttgcaacagaggtgaaatttgccagcctccaggttggagctttagaaagagtttttttgtttgtttattttttgtttttgagacggagtctctctctgtcgcccaggctggagtgcagtggcgcgatctcggttccctgcaagctccgcctcccgggttcacgccattctcctgcctcagcctcccgagtagctaggactacaggcacccgccaccacgcccggctaatttttttgtatttttagtagagatggggtttcaccgtgttagccaggatggtctcaatctcctgacctcagaaagagttttaaggccgggcgcggtggctcacgcctgtaatcccagcactttgggaggccgatgtgggcggatcacaaggtcaggagattgagaccatcctggctaacacggtgaaaccccgtctctactaaaaatacaaaaaaaaaaaaaattagccgggcatagtggcgggcgcctgtagtcccagctactcgggaggctgaggcaggagaatggcatgaacccgggaggcggagcttgcagtgagccgagatcgcgccactgcactccagcctgggcaacagagtgagaatccttccaaaaaacaaagacttttaatatcctcatctaggaatttggggagaaaccttatatttcaaaaccggcaaatccatggaaaatgttttactacctgcactcctcaacacatcccatgcagccactgtcagctggtctgaatacacaggctaaacctgtttgctacacttgtttatcatgttctatgaggggaaaaaggaatttctgcttcccccctttgtgacaaggtcagagattttagaaatattaatcttacctaatgaagatggcagccatggagcatataaaaattgagaaaagaggtgtaatatcatcggcctttgccaaacggacttgaagctgaagtggctgctgtgtatatttgactgttgcatcagcgagctacaatatgcagtgtgtaattactaacatttagtagagcagctctgtaacatagtcccagaaatgtgagcaatatctggtgtttgtacttcgcttaaatgatgtttcactagaattacccccaaatacgttggggtgttacagtgtgcctgataaatgaaattgtattgagaccaaaattgttaataataacatctcccttatagcccccagtaggtaaatgtacattgtgtaaaagtccacgttggaaccagtcatattacaaagcagtttgtgttcctatttcttggtctgccataatcttatgttttccaaaattggattggcattttgggtagttttccaaatccaagaagaaatatttttcattttcatatgttgacctttgtgccctttctaagtggttaatttaatttaggtgttaagaatgaaagtctcttacagcccctgaaccttaaaatgtaataatttattaaaattgatgtatacttgtaagagtaaattaagctaattgagactattgtttggggggctgttgagaccaacagatttctttgcttaaaagtgaaatgctgatttcactgttatccttagggatgggagaagctcttgcttaaggggataagaggctgatatggccccctccttcactcctaggtgtacactgcaccagcaggctttctatcacatctgaggacaggctgggtgttatcagtttactggagggggaggacatttccccagggcttcaggtcgcattccagatgtccaccagtgtctcgctctgttactcaggctgagtgcagtggtgtgattttggctcactgcaacctccgcctcccgggttcaagcagttgtcctgcctcagcctcccaagtagctggaattacaggcatgtgccaccacgcccggctaatttttgtattttttgtagagatggggtttcaccagcctgaaactcctgacctcaagtgttccatccaccttggcttccagaagtgctgggattacaggagtgagccactgcacctggcctaaaagtcttattaaccagtcaataccctgtgtttcaagggagtaacaatagatcatgggacataattaagcaaagcagctgacctttgaggaggtccaaaatgagcagacgagtaggagttcccgtcgatcaagggatccacttgagcccctaaaggattgcttatggcaagaaggtaaacctagagggagcagaggaccaggcagttagagcagggaactcctgaacagagaagcagattgttacctagagtgaaggtaaagtcaagaccaggcttttggccgggcgcggtggctcacgcctgtaatcccagcactttgggaggccgaggcgggtggatcatgaggtcaggagatcgagaccatcctggctaacaaggtgaaaccccgtctctactaaaaatacaaaaaaaattagccgggcgcggtggcgggcgcctgtagtcccagctactcgggaggctgaggcaggagaatggcatgaacccgggaagcggagcttgcagtgagccgagattgcgccactgcagtccgcagtcccacctgggcgacagagcgagactccgtctcaaaaaaaaaaaaagaccaggcttttagaataggacagaagcccaagtaggagaactacagcgcaacatcagagctggacagcagaagagagaatttaaaaaaaatatctggcctggcacggtggctcacgcctgtaatcccagaactttgggaggcctaggcgggcagatcacctgaggtcaggagttcgagaccagcctggccaatatggtgaaaccccatgtctactaaaaatacagaaattagccaggcgtggtggtgggcacctgtaatcccagctactcaggaggctgaggcaggagaattgcttgaacccaggaggcagaggttgcagtgagctgagattgtgccagtgtactctagcctgggtgacaagagtgagactccatctcaaaaaaaaaaaaaagctaacacttttagtatgccaggcattggtgtaaatatttgtcagtcctcacagtgagcattataataagacaggtatttttattatccccattttacagatgaagaaacaggtgccacgagattaaacttgcccaaagtcaaccagttaatagattgtagaactagctcctaaattgagacggtctaactgcagagccctattcttgatcattacactttgcagtcttgacactaagttattgtgtgtttggctcaagctcctaacccactcctgcctgacatcacctttggtcctagaaccaaggtggctgatcttgactattgaacctactgagaagtctggcaggacctggcttggatagagacagctatgtttccagtgtggagcaaagttataatgtgtcaccatatcaccaaaatgtaaacaaggaaggaaagacatctagccatttgagttcagcataaaagaagatccaaatgggggaaaatttatcttaaatcctcatctagagaaacagttggggctgcccagaaaaagaacagtaagaacaaaacaatgactgcaaagtggctagtgtgttcatgtgggtgtaagtgtgagcagaaatgatagaactgtgaagccaaaaattcaacctttggaagtgttattgcattttatacaagggaactccttttttggttgtttggagaattctcagctttaaaaattgcttttatctgtgacaataaagattccctaaagtggagcagcaagcaggcatcccctacttgctgaatatattgtaaataacaggtagaaatcagaagtaagccttgccttgcattctgttttctccacctctaccccaaacatttgttaattcaaataagctaataagtattgaaccctattactcactgtccactgagtacatacagatagatgtttggtttgtttaatgtaatcattttttgctttatttttaattaatttttactgaatacttgaatggattagataactggtatttttgtcagatttttccaaaatcattgttaagaccctgcctactcatgtctgatttctaagaagcaactttaatttccagtgaagtgtttgatgttttactccttaggcagcataggaaggggtaaaaataagatataaggtttcataagataagacccttataagaattatagtaatgaaaataaaattttttttttgagacggagtttcactcctgttgcccaggctggagtgcaatggcatcatctcagctcactgcaacctccgtctcctgggttcaagcgattcttctgcctcagcctcccgagtagctgggattacaggcatgcgccaccatgcctggctagttttgtatttgtagtagagacgaggtttcactgtgttggtcaggctggtctcaaacttccgacctctggtaatcccccgcctcagcctcccaaagtgctgggattacaggcatgagccaccgtgcccagcccaaaaataaatttcccaatagcaaatgtgattgtcctccaaagtcattctcctgttgctcataaaatagtagggacaactcgtaaagaaaagtagaatcgttttggccattttggatgatccatttgagtcagaattaaaatgcaaaccttaaaagcatttggcgtaataaatggcctctgtgaaatttttaaacagtataatcctggattttcctgtgcactgaatatgcaagttaaatttatacaaaagaaaactacaggaccttaatacaattgattattgctgtaaataatgacttccttaattttctcatcatgtgtctgtggagcttttaaatgcctaaacacagcagcagtcagctttgcttctcgtggaaaccatttaaggccatggtttttttttttaaatcttccttgtccttatactgaataaatactacttagttattggaggttttcagagtactgaatttatattgattgcaccctttgctttcaactttaagtaataaactcaagtcaaattatttttaataatgacatgactttctgatgaagcctgttaagtcacttcccaaatcaaaatatttaaattacatgcctcaggactccaggcactttgtctcaactgccattattaggacagttatggggtaaggcttttttaaaaagtgcagagaataagagcttgaattatagtgcattttttttttcagcattactgcttagactcttttcccagacacttggactaagatgaagagattcctatgccatatgtcaatctaaagagggcagaggcttgggacttcactgtagttgggtgctgggtctattcaggggttaatttagttctacttaaagctgtgactttttccacaggtggatgaaagccaaactggagaacccggctggcttggaggagaattaaaaggaaagacagggtggttccctgcaaactatgcagagaaaatcccagaaaatgaggttcccgctccagtgaaaccagtgactgattcaacatctgcccctgcccccaaactggccttgcgtgagacccccgcccctttggcagtaacctcttcagagccctccacgacccctaataactgggccgacttcagctccacgtacgtgttggtgggctctttctgatgatttttgaaatcccaatttgatcatttcccccccacccccttaagtattttcatagtcttggattgtccttctatgtgagggagctggctcattttcagtactcctttctctagctggcgaattggagattacagtccctgaactggatttaatgatatcattgtctaacagtgacttaccatggtacaaaatgaagcctgttatcttgttttgttcaataatgtatttgtatctatcattcttgtggaagaagtggagaaatacagtttcctaataatctattttgacatccatgtcagtcagcaaattttcagagttatttcctgcatgcaaatagcacttttttttgccaggcagaagcaaaaattgaattcagtcatgtggttctgaataagatagaaagctgtttcctttaaagctttccactttcattaatcttatacaaatgtacagtagaatgaagaggtgtttgcacttggccagttagttctgtgccctggttcatcaggaaatggcattttaaaaactgtgtgtaagcagaggtttgaaatgatagatgaaatggttgttcagacttccagttatagggccatgacctagatgagcaattgtctaaaaatattttatactaggatacaagtatgagtgatttgaataagaagtgtttaaattttttttcaagtctaatcatctttcagaagaaacaaattgaaggcaaggaatccagatgtattgctggagaaggatcagatggaacaaatagagggaagaaagaataattactcagggcgggaggaagtggagggaaggatgtaaggaatagcaagtttttcatactttattttcacataaaaggctgaaggcgctaaagaaggtcccctcatctaatctctgctttaagaaaaaaaagccttccattagcttgacttccaagttgaaacttttccttactcttttggtcttgactgaaaagttctgagtttttaaactaaagcttaggctaaaatagaagactaataccatattttccaggatttgttttgctggggatcaaatcagtatgcctcttcttcaatatatgtatggtgtgcagttctcttgctataattatgggcaccttattttccaaatgaaaaatcaggaattattttgattttcagatttgtttgtatatcttataaggatgtaaaaagtaaattgcctttagatctgcagtcacacagacatgtttatctaaaattattttttattatttattattattttgagacagggtctcacttcatcacccaggctggagtgcagtggcatgaccatggctcacagcacccttgacctcctgggctcaagcaatactcctgcctcagcctcctaagtagctgggcctacaggtgcatgccaccatgcccagctaatttttaagttttttgtagagatgaggtctcactatgttgcccaggctgatcttgaactcccgaactcaagtgatcctcctgccttggcctcccaaagcgctgggattagaggtatcagccaccatgcccagcctgtttatctaaaattattaaaatcacaaaactagaactgtccctgggacccaggacaactggttgctgtcaggatgccacttgtaattgctgtggcatctaggcatactaccaggtacttgctgtagagtgcatgggtctgagaaatggtgttgagaagctccagctccataggtggcatgtagcttttttttttctcatttaactattgttattacaaatgataatgatcatgtgaggatgtttctccggggctttgcagttacagagtatttccctagcctgtatttcatgtaccctcacaactaaccttaagtggcacagtattgttcccattttatcaatgaggaaatcaaatgccttttcctctcctccttgttcttttatttatttttctttttgagacagagtcttgctctgtcacccaggctggagtgcagtggcgtgatctcagcagctcactgcaacttccacctcccaggttcaagcaattcttgtgtctcagcctcccaagtagctgggattacagactcaatgccaccacacccagctaacttttttttttttctttttgagacagagtctcactctgtcatccagtccagagtacagtgatgcgatcctggctcactgcaacctctgcctccgaggttgaagcatttctccttcctcagcctccttagtagcttggattacaggggtgcgccaccacacccagctaatttttgtatttttagtagagatggggtttcaccatgttggtcagactggtctcgaactcttgacctcaggttatccagccacctcggcctcccacagtgctgggattacaggcatgagccactgtgcccagcctcctccttgttctttcactgtagaaagccacattaagtatactaggtttgtgttgcacaggctcattggttgccatctttttcttttttctttttttcctcttttatttatttatttatttttttggtactttactgtgggtaaaaagctggcatattagggagtgcttgcttttttttttttttggtactttactgtgggtaaaaagctggtatattagggagtgcttgttattcatggtgttgtgcttttccctccaggtggcccaccagcacgaatgagaaaccagaaacggataactgggatgcatgggcagcccagccctctctcaccgttccaagtgccggccagttaaggcagaggtccgcctttactccagccacggccactggctcctccccgtctcctgtgctaggccaggtaaaggcagccagtgagagtgtgaagacttagcatgctatctagtgccaaaaacttcagcaaatgctttttggcaatgtcattttgaagcaagccttgttatgtgtgtcttggttggctggcagtatgggaatccagtgcaggagccagaaatctgctgtgaatagttgggagttgggggtgggggtgggacacagtcaacttctcctgcctgggttgatgaaggaagcttcattgcagaagtggcacttgagctgcatcttgaccagtgggtaagatcttactagaaaatggagagagcctgcctgtcagacagaaactgctgggaaggctcgaaggcagacagtcagaatgtatttaaggaaaatcacatacccctccatttgtctagaccattgagttttttttggaaaaggtagaccaattaaaggttaatgggaggctctgaaatgccctgctcggaaagaataatgtctgaaaggataaaggtggttattctgaatagttctcttttgcttaatacaataatgataaaatactcaaatttctatcaataatcatgccaaacagcaagtgcccatctgggaggcactggaggttccagcatcatttctgatctgagaacacccagatggaacacagggtctaggcagatccatctggaggagcggtgtgcaggaagattagagtggagggccggcagggcggtgccaccagtcagggggctgttggtgtcacccagctgagacctagggcaggcctggacccagctgagttcatgttcaccaagtagggaggtgccggtggaagcagaagaggcgagcacgtgggagagactgcagaggagagtgaagaggttggagtcacaatgcctatgggagccgaaggaaaggaaagagggctgggattgagaataagggcccaccttaaagcgggaagggagaaaggcagaaaatgaaatgaatgcgcagttaaagggaagagttgtgttttagttgtgttgagttgaaggtgaacgtgggaccctgtctggcaggctgtcggaatatagatctggaggatggaagagagcacgagactgggattatagattggagccattcccatagagaacattatcggatatcaggaaatgtgtgaggtcatccaaggagagggaatacagggagaaaatagcaaatccacaggcacgtgtgtgttctgtggtctggaagaagaagaggagctactcagcaggaaatggtactttcctttgcatctgtcctagctcagcatttagcacgtgtcacatgctcagttaacagtaactcagtgatggggtgggggtttgttccagagagtggaggtgggggatgggaggttgcttatgttactaagtaccgtggtcagggcaaagaagagaccattcattgtgacaggtagagctttgtaacctgggaaggagaaggatgaaaccacactgcaggggcgtaaaaggaaatgagcagcaagaaagtggaaagatctgcaaaaggaaagagaaggaccagagtgaggggcctcgggaaagcaagaaccagccatgttgccagtggagatgggaatggaaaagtgaagtgtcagaggatatagttggtataaggcagaaaacattaaaagcacagaaaagacaggagtctttttcttctggatgaggaagagtgaagagattggagaagataaagccaagaaaaatgttcaagttgggctgcatgatattgttctcagtgaggagggagcctggaggggctgcggagtgtagaagaggtttgggagcaggcgaatgagggatccgacaaagaagaatgaagaattgggccggcgcggtggctcatgcctgttatcgcagcactttgggaggcaggcaggtcacctgaaatcaggagttcgtgtccagcctggccaacgtggtgaaacctcatctctactaaaaaaaataaataaatacaaaaatcagccaggcatgacggtgggcgcctgtaatcccagctacttgggaggctgaggcaggagtatcacttgaacctgggaagtggaggttgtggtgagctgagatcacaccactgcacttcagcctgggcgacagagcaagactgagttctcaaaaaaaaaaaaagaattgcctggcttaatttaacctgagtccgtaatagatcattgcacattgcctcagctttctctagcaatgcttcacagcttgggactaggaataataatagttatatagctcaccactgttatttctatcatagcaatactgtgcatggatcttactaaacttccttccccctccccacctacacacatcttgcattaccatgggattgctaaactttaatagccttttggagaaagtatcatctctactttacagatgtggaaatcgagattcagagagattaaacagttgccaaagccagaaaattagtaagtgacagacctgggattcaaacccagagtccacatccagcccaggctggggtcattagggcccatcaatgtgaaaaggttgacaaagcagacacggggaagatttctcagggggagagattctgaaataccagtgagggcacagttgaaaggccaaccctggggtccatacgtagagaaatcagtgaagtggcggagaggattagacagtgcagaagggctgtgggatgaggagctacgcgggcagcaggtccactgcaagagggggaaaatggaaggtcgagaatatacaatcttaggggtgttcgaaatccagggaaaccccctcagctctgagggacttgaaggagtgaatgtacagctaagtggaaggaaataggatagggatgttgtgggtttaagaaggcaagaacccatgaagaccaggaattagaggttatcaacatagatgctgaaactatttgacctgttgtaaattctctgctcatcagacataatcataacttaatgtcagtataatataaatgacttctaaaggcatgtacaaattggttctgaagtaactctctctaggcattatcttttgttcttgtccattcatatatatgattgaaagttggtgtttcattttttactaaatgctttaagatactgtaatggtttaatgctatagcttaaaagataataaatgcctcaccctgcctttccagcctgacttcctcctccacccctccatgagactaggccacatgcagccccggattgtgcttctcttcccggaccccctgcagtgttccacctcgaggcttttgcccatgctgcgccctcggcctggagtgcccttcctccgaagccctagctgtcaaagtccttctcatccttcaaggcccatctcagatgctgccccctctgtgaaatttacgctgatgcccccaggcagaattcatccctgttttctctttattcctgcagtgaatagtaggaactcctttttagtatatttcattctgccaggtggtacacttggttgtttttatctctgtcttccccattacttgtgaattacctgctagtaatactgcccatctttatagtgctttgtggttaataaagtgcttttccctaaattatctgggggaggcagagactgtttttttcatctgtaatctcatggggcagtgcatgtagatgtacaataaatggtaattacaatgaatttatgctaaccaaatccctgttttctctgaaaaggaactaaaacaagcataatccagatagggcctatttccctgggtctacctaatctaaaatgccagttaatgatctcatgatagttcataaaatgtctgctccactgttaatcctccactaaaaatgccagtcaaattggaaatggggaggtgtcccgggcaacttgagagtgaaaatagaaccaaaatataaagggcacacagccagatgcaacagaataattgtgacctcctggctttttgaaatagagagttctagatggtcagacaatgactttgtgaagaggctggaaggctttggcctccacttttggaaataaacaattgttgggaaacagtgaagcatccagccctcctgctgtgctgcctcagggccctttgtggctgtgtgtgcttgtctggcctgtgcttgttggagaggtgccatgctcacgtctgccctaattgataacaaagcgcaacataacgagaggtcctttatgttattccacacaagggtgaaaaggtggaggggctacaagctcaagccctatatccttggagagccaaaaaagacaaccacttaaattttaacaaaaatgatgtcatcaccgtcctggaacagcaagacatgtggtggtttggagaagttcaaggtcagaagggttggttccccaagtcttacgtgaaactcatttcagggcccataaggaagtctacaaggtatttttgtatttatctgcttgtatttgatgaaaacaatattaggcgttatattactgtttgcactagttaagattcacagacaggagttgcgggattagtttgtcttctagatcttttaactgcaaaagttatagtatatagagtaccaaaagggagcctcttatagataagtgcattctttcttctctcatgaaaacctatgtgccttgtttttcattgccttatgcaagaaggaattcagctctgagacctggaacactcttgtgcattagttggagattatgactctctttatgcttattacccagtgctgtaccagatatatgtgaatacttggaaacccaaaggatctggggaaatgatcagaaggacttaattgtctttttcattagggtcttatagcatggaacctaaggttgttaattcctccaaccatattgatgttcaaaacaaattatgagctttaaaaggatgaaaatagcaaaaatattcaatgagcatctctcagtcagtcatgccttgaaataaactagtacataagccatgtgtccagtatagcaaagtgctgaaaaataagaatgcgagcttagagtcatgcctctgtagtaccttattatgtgtttttaacctagctaagtacaactatttcagctgtgggtcgtttaaagttttaaaagttaagcagttttaacagaaaaatcagtgtcattgtacgattttctttgaagataaaaattaaaatactctcttcttccattattgcagcatggattctggttcttcagagagtcctgctagtctaaagcgagtagcctctccagcagccaagccggtcgtttcgggagaaggtgagggcctgagttgtattatgttcttcagaagggtcaaggacattgtgtaaatgtttgaaatgagattgaatttcatcttaagatagactgcatttatgatcagtatattaaactacagtaaaatgtaagtttagctctttacagaatcggagtacttcatggaaaatactgtcaggtatattaatcatcaaaaactgaattttctaattatattttattataagccctttgacttttaaaagagacccattcagttcactaagaatcgagttttccgagcatctctatagctaaactatggtcattgcttcacctaacatagtctagtctcatctgacttcatagataagtatttcgttttaaaagtaactacaggccgggcgcggtggctcacgcctgtaatcccagcactttgggaggccgaggcgggtggatcatgaggtcaggagatcgagaccatcctggctaacaaggtgaaaccccgtctctactaaaaatacaaaaaattagccgggcgcggtggcgggcgcctgtagtcccagctactcgggaggctgaggcaggagaatggcgtgaacccgggaagcggagcttgcagtgagccgagattgcgccactgcagtccgcagtccggcctgggcgacagagcgagactccgtctcaaaaaaataaaataaaataaaataaaagtaactacacagaccactagagttctcatagtaacatgaatgccatctgtaccatcccaaatgaaactgaaactcaatttctgtgctccatgaaaacaatcaaaccagacaatttaggactaaaaaaaaaaaaatcattttgagtatttattatgcaaataattgccttctttctcaatctccacttggtgacataatcctaaatattgtatggatgccaactgaataaaacttaggtaattcaggccctcatggtaaaaatctcacatcttttttacattcaatacagccatcatcacatcctaactggagagtgctccctgagttagatgggttttctgtgtagacatctgagcagtgttgtagttaacagatgccataactaaccaattctatagtaattctttatgggttccttgaatacattacaggagaatagaatgttttatttagtttgtctgccataatgagattgttaacattccttagaaaccttgcccagtgaaaaacagaattattaaaacagctgttttaggtggagacagcaaggattaaggtataatggtatttcagactcacagtaacaatgttcttttttcaagaggttttttaaagtaagaattttttttagttcatagtatagctataaaaccttatcactaaacaaatccagcatctaatttttgctattaccatgaaaatgattaacagagttccctttatacattctcattatcttaatgactttttatccactgttagggtaacaaggcaaaaagctcctttaaataccacatgcagtcagtttagtaaaaagcaacttatgcacctcaccaaaagataaagaaaaaaactttggtgtgttacatccaatcaaggctcactggagggctggagtttgtatcttgactcacccatctagtaacagtattattttgtttatgccttagcttctttgtctgtaaattggccgtgataactaccccttgaggtaggaaattattacaaggataatgagataacatgcagaaggcttttagaacaaagctcagtaaatgtctgctacttttatgtcgtttttgcttcattccctggattagtgataaagccacataaagtatgagcatcctcatccaatagcagtatggaggagtgtttgtttgttttgagacatgtactgaggactcaataaataggtcacaagtgaaccatgcatgtacttaaaattgggcaacataatagagttaaattctgatcttagtttgtatttattacagccaattttgaaatgacttagttattagaaatatttggaaaggttgctggctttgtgaaggggtgggaggacattagaaattctgagaaaagctatttacatatattaatgagccttttgtaaataccacattgaacataatcaaatttaaagtaaactgtaaaccagataaaatagatgattggcttgggttgcttttaaaatatttaaaatattggcttggggatggccagtgccctctgtggaatgtttcctgagaaggggtagctaaagaggaacctctgcctatccatcatcatgtctctgggtttcattgtcaccctaaagccactctcagatgtctttgtgcaaggcaggcagggcaaggccagcctcagtcttcccagtctcctttatattttatactgcaataccaagttcagccagagttcatgtttctgaagtttcttaagcatttggaaagttacttcaaaatttggatcaattttaaagaaagtaactttgaagttgaggaatcactggggaaagtattgatggccaaggatcctgtcttaaatggccaaatatgatctaaagaacagtaacagggagcaaaatgaaaagggaagggtgagagtatggagaagtcagaaaaatgagtctgttaatgaagaaagaatgaccctattaaagccaccaaactttgatttccttgtgtgggaaatcatttttccaattttcactgtggaggtatgtgttaccagcgcctcagggctaaagacagagagtcttctgttttccctgggacgtttgaatgacctgtgtctgccatggggcccagtgctctccaccagcaattgctgctggcctcggcgctgacaggtcaacactggcgctgaaggaggcccttgttgctccaggggctgcccacgtgagcacaagagttagaggtttttgtgtttttgtctgtttgttttagttttcattagtacctcctgcagaggctctgataatcaaccgaaggagttctccataaaaaattcctacctcttactcaacacgaggctcgacattaaaggaacatcatctgaggtttagagagaaacatacattgtccatcataaaaatgaactttttgggtaaatggtgatttttctgttgctttaaaaaaatacatacaaaagcctaggataaaatggagaaaaaggggaaataagaaacctgtgcatctttctgtaaatcttttatcctgtacctagaacctccatccaggattttgtgtctggtgatctttctgagagtgtgatttggttctaagccttaataaaatccaccaagagtgatgcaaagttctacatctaattaaaaaggaaagtttcttctgtaatgcacacccttcaaattcaagacacaaaggaacattagttcttatcctttaagactaaattacatgaataataaaatgtgataaactgtgatttgtctttttaacttgttgaaaggctttctgggattgggttagacattccttttatcatcagtcctctctacctgtttgtgctcttgaatgacaactagatgcccatttttaactaaacaatatgtgtaactcattttgtgttctaacagcttcctatcatattgtgtatatggcacaataggacataagttttcaggcacttcaataaggaaaagtatgtcttatttaatttatgcgaaggatatatgctatctaacaattttttaaaaacctgtgacgtagtaccctcaaaactgaaatacacatatttaatatgcttaccaagagcctgcatatgaatgcatctgacccagtgctcagcacagagtaggtattgtgtaactcttagttaaaaataaatgtaaaaaccattttcattcaaaaagaaatcatgatgctaaatggtagatcactcttaaatactcaagtgtcggtaaacatgcagttgggttttttattcctgtgtctgggtcttcccaggaattgtctccctgtctgcagctactgaacttttatgtgcactgggggaatgtggagcccagggcattctgcagctctgtattttatctgtgactagcctttctcttgaatggatcttgtcctaacttccttattcgtaaacttgcttttgcaaagctgtctgggatttctttaaacaatcaagctctctccgtatctcaatatttctccccaccagaatttattgccatgtacacttacgagagttctgagcaaggagatttaacctttcagcaaggggatgtgattttggttaccaagaaagatggtgactggtggacaggaacagtgggcgacaaggccggagtcttcccttctaactatgtgaggcttaaagattcagaggtaaacccacattaactgtttcctctccctttctgtgcggtgattctctttgtggggagtcacgatgtttgacagcggaactttgttgggttttgctaagttctggaatgtgacagtaaatccagtgtgacctgtcattgtttgatcttgtcatttggcactgcgcagtaagcactggcttcccccaagcagaatgccatcagggctaagtggaggctgagtgtgatggggctggtccgcatcagctgggaggataatgttcagtattaagctctcttcctgcctgtaactgacttacgctttggagtaaactttcttgattagatcattatggtcattgatttttaaatgcccaagaatggtagcaatattttgcctgtataaacagaagtattctggtgataatcgccccagaatattggatattattagaaagtttttagaatttctggttttgcccacacagtagaaagacacaagatctaagggatgggtacacttttggctaggccttagaatctccgttgatcaggactgaatttaagtgctgttatccgtatgaattggaagtgctctcactgttgttaaatagagccctaaaaatttgatcacataaactgtggtcttaagatagtgcaagttgaatggaatggtggggtggacctaccacagagcatgggagtcagtcttgtaggagccacttgcacgttagtggagagtttcagggtataaatggagtcatttaacagatccaatgcacatttaaaaaaaccaacaagaattaactccttttttttttaagtgttgacagtcaattcacagttattttctttttctcctcatacctcctaggtactgagagagaaaaggctggcagggagcctgtaggggccgctttctcaggagtgagcaagtggacaaagttctctctctctttcaaatgccagtagtagagtgtatactgggctcttacatgtgcggctccgtgtactcggagctgctctgggagcgaggctgggcctggtgccctgctctaggagtcctgcccttggcctgctcacctctcctgcagctcccagaaatgattttatttgcttgggttttgtttttttaaggggtggcattgttttgctttttggtttttcttgctgcggtcttgagagcagctaagtggaattcccatggatggatttacataagtctgcccacccttggagaatctggcagaagcccggaagaaagtaattttgccctgcgagacagctggcatattggacttttcagacctggaaacagagaattcaattcttctccaggccagcaagtcgagtccaatgagagtcatacagatgatatttcaggggaattgggtaaaacactaaaagccaaactcaatttctactaccgtgcatgaaaactcttaaagtgactttaccttttggatcagttaaaatacgaaagccattacttgtaatgtattttaataagttacagttttctactttaataaaaccatccgaaataaattttaggaaaacacacagtgacttttttttttaaggtaagtggagttgtaaggtactttcttaaccacagtcttaaattattagccacagaagaactagcagtactagaaatttttagatatacatctagctatactattcaataataatgaaaaaaaaacctgaaaactcagctctttcgtcctacttgaatacagaattcagtgtaaaagcaaaatatccgacccaacctaacaccagacccagcttcagataccagaactgacgtctgggcatggggagagtcgtcccatcctgcttcccttctctgtatgggcaggtctggggcacagtctgggggactttataggtgcagggaggacagaacatggccttctgaatccatctcagcttatggggctggctgtggtttttcaaagggagcacattgaaactacttgaactctagggtactgccaattgccttgttctttttatggagtatagggagtagattctaagcctgtactaggaaagttaactggtcactggagtcttgtttcattggtattcctttttttgatatgcagcctattgaaaaatagtgagagattgcttttgtataactttgttcgttaataaagcagaatcagagtaaaaatttaacccgaacttttcctggtaaatgtttcttaaatttcaataagcaaaataaagagactgtaagttgtgttcctggtagataaatggcatatttttattctttcagtaactcatgttttgtttattaagccttttgttttgttttaattggaatgcttaatttactgcaagatagactcaagcataaattaatttagaataaagtactttgtaacaacagattccgttctggctcctgtcctgcctctcgtggtctctgttgttggcttacttggctggtttaaaattccatgagtatcccagagaggaattcaaccccagagcactttttaaacacttgatagttgggaagaaatatgctctgcctctatgcattgatagagaaatttcaatgtataaactctgtgaaattgggtggaaaggccacacaggacagccactgcctctttggatagagaggggtgaataggatgggggaagagaggttccagttgtccctgttagttttttaaaaaagaaagctcctgaagcaaatgtgcaaaatattaatattttaatgtgttaaaaccgggtagtaggctcgtgagttatattccctgtactttttatgtgtgaaatatttcataattagccatgtgaaaataagtccgagcttagtgtttaggatgtaaactaacagtcttcctagcctggaacctcctcttagatttgaccaggtccgagaagtgcctgtgcttggagccctctgggctcttacaggcgccatactctgctgtttttttctcttatagaaatgagtaaaagccacatgttttaattatttttttccatgttttcctgatctatatccttgtgtcaggtgatacagtgctatgttttcccagaatgaaaagtggggctttggggctcaagcgggtttgtatcatcattaatcgtttttaaagttgcatgatcaaaacttcagcatgcaaatgagaccttttgctctgttttaagggctctggaactgctgggaaaacagggagtttaggaaaaaaacctggtaagttacaaaccctgatgcttacttttcaatgttttgaatgtaattgatagttgctccccatctttgtgtattagggccagaagcctaaaataaaaagaatctttcctaagagtggtgagagtaagtcctttccttggaatccattaataattttacttggttatgagatttgtctgttgcttcacacatgaagagtggagacgttacctaacagaatgttctcttgggttgtcgagaaataattcaggtgaggccaggcacggtggctcatgcctgtaatcccagcagttttggagaccgaggcaggtggatcatttgaggtcaggagtttaagaccagcctggccaacaggggaatcccggtctgtaccaaaaaatagaaaaattagccaggcatagtggcatacacctgtaatcccagctactcgagaggctgaggcaggggaatcacttgaacccgggaggccaaggtggcagtgagccgaggttgctccacttcactccagcctgggcgatagaacaagactctatctcaaaaaataaaataaaataaaataaaataaatatatagataaataattcaggcaagatgctgggaagttataatacatggagctgtaggattatgggctcagctgcttctccgtcttcctcttaggcttggttagccctttttcatttcataacaatgcattcccaggacacaaacaatggagaagattagagtgtaggtcccattaatgtagaagccataggatggttttcctcggtacacattgaaggtacaaaattgtagtcatgcctctgaatccaaagtgttttagtttatttcagtaaaatcacatgtgctataaatagcacgaaaaagaaaagaaagaagcggatgtgaaataatacggtttctgtggcacgtcttcctggtctaggtcatttgaactttttggctatcatattcttagaaaattataggttgaaacagtcactgaattgccaagagacggatttgcttgtctgtctggtgcccagctccaactgggcttacatggctagggaaaagaagggaaatttcacgtagtctaggattttattttagtcagataaatactggatggagtatttagtcagataaatacagtggatggagatacattggaccaccccaccaaatctccgttttaagtgtaagttttctaagttttgtacacttgtcattccagagggtccagatatttcatagatgaagcccaggtgggctttgctttgcactgaaactagcaagaaaggacacaaaagactgcagagaatgttggggcagattgctggctgcgtatgccaggtcccttgaggagcaagaacatccagtgccaaataggacactagtttggtctttctccaaaccataaactcttggaaccaagagctggtctttggtgtgttgcaggagagtcctcatcccagcgtagacatcccagctggagctcccagtcagagcctaggctgggccagtagaccatgctgtggcctttcttgcttgccccaagctctgcaaagcatcaggcagggccaggcctgcaccatgaccgccaggtgcttctatcctggtggccgacccctgatagcatgcagaacagaatgagagcggcttgcttaagggccagagtcttacttgttccctggagtgagtagaaaagtaggaaatctcgtcagaacatgagacctttttgcgttcttcctttccattcttctttacttcattccctctttcttcttttttttctgtccttctttccttcttttctcctttcgttcacaaaccacacttggagagcaagggtagaggagcagaacagtttgttctctattgcttctagaagttcagaaagcagtagttgcagatgagccagaactcaggcagagaagggttctgtctcttcatactcagtctcctgggcccgtggaaatggtgtgtttcagagcctggtctgtggtaccgctggagtttttcccatgggacttttcacattcaggaaaagtacagaactgttcacatttttttccctgtgctgaattgtttttgcataaagttcccttcttaactccaggtccctcctgtaacgtgaaataaaaagaaagaaatttgccctgccatgatttgcacctgatattcagggatcactctcaaaatgtgagccataaagaagaaggctgtgtcgttgggagtgagaatctgcagcaacaacatagaaataagcccctgccgggctcccagtggtttctgaggaaaatgggcttctctttctactgtacttggcagctagaaaagctattgagtcctttagtcacttcaaagtagcactttagccattgggtgctactgtgctggggtgggtggtgaatgaggccccacccttggcctcagggcattctgggtaattatgggaggggtgtgacagaaggtgccaggagtgggcaaggagcggacttcgtggagggaagttggtaagtaagtttcacgggatgacaagggagtctgcagcccactgagggctcaaggatcagccaggcccttgaatgccgtgtctgcctggtagctctgggaacgggcgattcagggagccttactcgttgggtagaaatccagctcaatacattggttttgatgtgttcatctgtgaacctgggaggcgcctgcatcttcttggccttttctcctgctgactcttaacagtgcactgccgtgtttgatcttgtttttcagaaattgcccaggttattgcctcatacaccgccaccggccccgagcagctcactctcgcccctggtcagctgattttgatccgaaaaaagaacccaggtggatggtgggaaggagagctgcaagtcagtgtcttttttgtttatttacaattctccatccaagtttcaatacacaaaatctcaaagggacgctattttattgtaaagtacaaaccacccctcaccacctaaattctgtatttggatagtgagagatgccaaattttctgtgtttgtttggttcctaagtttcagacagccggtaacagatttctgagagctaggagcgcatacgaaaacatatctttcccattcctgaattcagatagagtcggcatagtgagaactcatatgacgagggatgcctgcatatccttatgtgccttggcattagagagtggagcttttcatcagtggtattagaaggtgtggcacaagagcagatttctttgcattcaaagccacatccatacatcacagtatttttagttcccgtgtgtgtgcgcgcacgtgtgtgtgtgtgtattgttaatcatatcatcttgtttacacattttaccattccagatacttcctataagtctcatttccagagacaaagatgctttaaaaagattactgttacgcagttctcatggtaaaacttcttagaatcattggtggatgcccaatctgcaagaaaattttcagtaggagcagaaaatgtgcatggtcttgaagtgacccccacagatcactcatgatctgcaggggaaaacacaataattatagagtggggaactaggacaagacctgaatgaggtgatcagaatgatgagcagtggggagaccagaggacatggtgtgtgtacagctgtgccgggagggaggagggagggagtgactggtcttcaaaaccgtcaggatcataaaagacaaaacctgtcgaaagggggctaaagaggcgtgaggactggctgcagtatctagactcagtgcagtatctagaccctgtgtgaaagaaaaccacgctgtcaaggacatttttgggataatggacaaaattgggttatggacactacattagacaaaattactgtaccagtgtaaaatttacagaaagcaataactgtactgtggttatataagagaatattcttatttttaggagatacgtgttgaagtatttaggggtagagttaagatgtaagcaacttgcaatcagatgaatcaaaaaaagaacttgcagagaagagggtggggggggagggagggagaacgcgcacaaatgagggagcagctgctgccaagtgttgacagtaggtgaattcgggtaaagggcctatgggtgttctgtgtgcttttcttattcttgccaattttcctgagtttgaaatcatttctaaataaaaagttgcctttaaaaagttactactatagcagttacttgagaggtaagccagctgacttttcatacagaaagtgtgtctccctccccgcatcctcccccatccaaagtgaagatcagcctcagactgccaggcgggcacctggccacctgcttcatagcttagtgaaggacagggcttgctccctggcttgcccacatggggcctatggaaggactgaattttccagcagccgtccgtctctctggcgtttgttgaacgtgggcctctgcgtaacacaggggggcctcagtaaggcttgaacggatataggaaggaatggtttctggaatgctttgtgaggaaggggcccatgggaaccctttggtggctattagtgggcctgtagactgacttacccaatctgctggtatttgtctgcccatgagcaggacggtatggaactacgtaagtttgagggggaagagggaggcaggaaacctttgccatgcagtggactagccacggaagacagaccctcaggtgctcctgaggaatggaggttggaacagcaggagcaggaaggaagaaggccttgctggggaaggcctcgggtctcacacagtcccgtctaccactctgtggaagtgagcctgaggccaggacaggaagagccacactggagagctgaatatataagaaacgcatcttggccagaatagaaggcacaacctggagtgtaactaaagatgaaactttccctggagagtttgctgatggacacccataaatgtccagatactactcactggttaaggaatctgacctctggaggcctggaaatccactcctttttgtcagcatgccttctcctgtgctggggagggagaggcctccttagaccctcgggtcccactccctgcttagagttgtgctgtatcacccattggtccttccagcatcatgcccctgtcctgttctggagacgtgggagactcccatcgcctgtcctccttgcctgccaggggaaggcttcctgcggggcccctctccccggtgcagcctcacgtcttaccgctgagcaatggcgtctccactccagcctctttgaaacaccagcaccccctgctctcctgccttgctgcctttgttcatgacatttctcaccagcggccaaccagctccaacctctccactttcgcaagagctgggagatcccacttctggaagctctctgtgaccatcccaaccagaagcaccgtgtccctcccctgagctccagcactggccccgtgccggcaccactctttagtattttatattactttgctttctgtgcacatttcttacttccacatgtagctgactagcaccttggaggcagcagccgtatttttcagtccccacacctctagcactgtgcttaagtgagtgtttgagtggttcttaggattctcaataaagtggctgagttgccatgacccaggagagctcctggcgctgtcaccagagtgactctcagcgtggatccacaaatgaggaaacaccagtgagttctgtgctgtgctgcagaggtgtgggaaagagtggtgtcattgcgagcagaatggtggtatactcggtagataaacgtggaaatttgtaaccagatggcttcagtcatcggcaggttcactgtaaacataaaagctttagtccttgagccaaggggatggaatctatcagacctcaaggaaagggaaacctgctctgtgttctgaaaatgacctagaggtatccctcttgataaactggcaggtgggagggcagaggtaatgtggtggaagttttcttttcttttagttttatttccttattttgggaataggtaattatagtcacatggtttaaaattcaaaagttacaaggggatataaatgtctccctcccaccttgtccccagaggtggctgtttcgatcagagccttgtttctagacgtgtgtgtgtgtatgtgtacgcatgtgtgtgtatgcacaagtagttttgggttctcttttcttggtggtgtacagaagggtagtcaaagcccgactcatgatccctaactcgagtcttttaatgggattgtgtcctaactgcaaaacccgcctcaccaactttgttataaactccccgggtttatagggacagtcatctactgtcccttcctaacagcatggtgcagaaacactccataaatgagtcttgtgttgaatcagattgaattaagtgagaaaggaatggcggtgaaaaatgtggctttagtcatcacatgggcctacgggtttgtgaaagtaacattgagtctccttgtgttctgtgtgtactgcatgtatgtcatcttgcatctaaggatgtatattacccataaaggagcatgcagacacatgagtgcatcttggcttgccactaactgcctgtggccttggggctgtcactcaacttttcatctggaaattgagaataataatactattatccttctggaattgtgtgcataaatgcacagggcctggctcataaaaagtactcagtgagggccgggcgcggtggcgcacgcctgtaatcccagcactttgggaggccgaggggtgcagattacgaggtcaagagatcgagaccatcctggctaacacggtgaaaccctgtctctactaaaaatacaaaaacaaaattagccgggcatggttgcggtgtgcctgtagtcccagctactcaggaggctgaggcaggagaatggcctgaacctgggaggtggagcttgcagtgagccgagatcgtgccactgcactccagccggggtgacagagcgagactccgtctcaaaaaaaaaaaaaaaaaagaagtactcagtgtgtattggtggccattattattattattattattattcctaaaacccatatacagtgttggcattaaccataatgtctacattacctgaaattaacagctgagtgctagcattacatgagtagaatttcctgtcccaggcaatccatggtatatcttaattttgtgatccacacagtctagccgaagcaaaaacattctgggctttgctgaccagtgattgccacaatttgaatttttagctatggtgttttacttttgtgacatagtaatccatagattttaccgttaatgtcatttgtttttcagttatatgtaagctttacataagtgctctgttataaagtgagctgtattataaaagatgcgcctttaaaaatgtttgatgtaattattttcttactaggcacgtgggaaaaagcgccagataggctggttcccagctaattatgtaaagcttctaagccctgggacgagcaaaatcactccaacagagccacctaagtcaacagcattagcggcaggtaaggagtttcgcatctctaactggaagatggtctgcatgccacttgagtttttccacttgattttctcattaaatatcttaggttgtttttcacatgtgctttaaagcacttcctgtacttgctgggactgacacccaactaatgtgatatggaatatgtctttcaaaaggaccagatatctaagtggcttttctgtgctggatacaacagaacccttgttggaatgctcttcttgcaggagtcatgaatgctgtggcattaaggccacattttcctcttgatttccttccagccatttaaattggggtttaggctagggggtgaggtgacagaaagggacacccaaaaataaacggctggggtctcagtaggtcatgagatggagctgggggccacgggggttggggggctataatgtggtgttcactgaagaccaaaatagctcccctgtgacattcactgtgggcagagggggcttcgctgggcaggcaggatgttgtactcactttcctggaggactggaaaagaacagagcacagcagttggcccagttggctattttctgattgaagggaccaaatgagatgcttcagcaagatctgagagaggtgaggtcagggggagcagatttctgctttaggtctttaagccatcattcttggttggcttttgtggaaagtgtagaatttttgttccaataccttgtggttaaatatctgtgctgtatgtacccagtgagataagattaaaaactggcagccttctcaagaaattaaaggatgggcaaactttgtgatgagccgcagtccccactgggcctctttgcttgagctgtggccttgtgtaggctgaggaatgtggttcccgcagggtttgctgtcccctggagagatgtgtcagtatccctccacttccatgtacagccccttcctcaggcccgctgaaattagttgctgaagtgattgaattagctggagaatttaaaaagcctaaacctatttattaataggttggttaagaaagattcatagggactgtgacctgttggtgcagactcatctgaagtagaagtgccaaagaatgagaacaattttacctcctgtaagcttgagagaaaatgagaaaagaaaaattgttcttgagggtggagatttctttcaggacaacattttgagatgcaaagatacagcagcagaaaaatcttttgaaacactgattttaggcctggcatggtggctcgcgcctgtaatcccagcactttgggaggccgaggcgggcggatctcttgaggccaggagttcgagaccagcctggccaacatggtgaaaccccgtctctactaaaaatagaaaaattagccaggcgtagtggtgcatgcctgtaatcccagctactcaagaggctgaggtaggagaatcggttgaaccctggaggtggaggttgcagtgagctgagatcgtgccactgcactccagcgtgggcaacagagcgaggctctgtctcaaataaataaataataaataaataaatcactggttttagttttccctaagatttggaattcttggaggtcaaatgatgattaccttccactttaaaccaaaaaggaaaaatgatagtaaagtccccatgatacatagctgtcctgtgcagcagaagataggatggggttgggctggtctttccagagtcagcagtaggaaggagttccgctgcactcaaaacgaaagccctcgattagcactgtacattttctgctgacaagtaaacatgaaaaagaggacgatatcataaaaactaaagacttagtgtgaaaattttgttgttgtcttagtttttaattcttcacctttattgcccacactgtaaaaagcccaacagaacagttccacctactgtcaccctcttctgaaaggacagaaatagtagctgggaatgttgaatggctgcgcggtacccgttgtgcattctccggcgggtgtgcagccgctcacccagccctgtctcctgcagtgtgccaggtgattgggatgtacgactacaccgcgcagaatgacgatgagctggccttcaacaagggccagatcatcaacgtcctcaacaaggaggaccctgactggtggaaaggagaagtcaatggacaagtggggctcttcccatccaattatgtgaagctgaccacagacatggacccaagccagcaatgtaagtgccctggtggctctgtcgcctcgcctctctggtatcttcccgtaaaacatgcagcattgctctgattctgctgagctttgtttgcagaacttaaagctagaccattgctgcattcgcagtcgtctctttgaagaccttctgtaatgcaagagtttatctcatggggttttatttctctttaattttcattccttctgtagcatgtcccctccctcccctccctcctttttcctttttttttttaaatcattttggcaccatgctgtttacatgcctgactcattttcctagcttgaattttgctcattgttttgttttgcttatgtgttgttttcctcctttttctaggaatcatatgttgtccatccccccctcaggcttgaaagtcctcaaagagacccactatcccatatcactgcccagagggatgatgggagatgcagccttgatcatgtgacttccagcatgatcacctactgccttctgagtagaagaactcactgcagagcagtttacctcattttaccttagttgcatgtgatcgcaatgtttgagttattacttgcagagataggagcaaaaattacaaaaacacacagggtagtgggtccttttgtggctttcctagttactcaaattgactttcccccacctttgcacaggtgctttcaatagttttaaaattatttttaaatatatattttagctttttaataaacaaaataaataaatgacttctttgctattttggttttgcaaaaagacccactatcaaggaatgctgcatgtgctattaaaaattgttccaaatgtccataaatctgagacttgatgtattttttcattttgtccagtgttaccaactaaattgtgcagtttggggcttttcccccttaccatagaagtgcagaggagttcagtatctctgttttaaagacgtatagaatgagcccaattaaagcgaaggtgtttgtgcttgtttgtgtgtatcagctgtaccttgttgagcatgtaatacatcctgtacataagaaattagttctttccatggcaaagctattaccttgtacgatgctctaatcatattgcatttaattttattttgcacagtgaccttgtagccacatgagaaagcactctgtgtttttgttcggtctcagatttatctggttgagttggtgttttgtttggggtttttaattttgcgtgtttgcatagcataaaatcagtagacaacaccactgaggtcgttacgatcaacgatatccacagtctctttttagtctctgttacatgaagttttattccagttacttttcatggaatgacctattttgaacaagtaattttcttgacaagaaagaatgtatagaagtctccctgcaattaatttccaatgtttacattttttaactagactgtggaatttctacagattaatatgaaatggagctcatggtccgtttgtgtgttagatatgctgtagctgaagccctgtttgtcttttaaacactagttggaagctctcaataaaaatgcctgctgctcacagcacagaaaatggggcagggggagcctcaagcacaatctagctgtcctcctaaagactctgtaatgctcactcccctcgcgttctcccggcgctgtcgggaggctgtgctggtggtcgtgtagaggtccttctcctttcacatggtgcagagagcgaggacctctcctcctcgttcagttgcacttcagtattttcacggatatgaatgtaaaatatataaatatataaacctgcggctttaacaactgtaatacaaccttttgaattagttccgtgtatagataattaaattcttcatacaaaagttagatggaaatgtctctgtgttcttgatgttggaacctggcagtggtggtgaggaaccaagcagactagatgtcagcaatgggcctgctgcccacgtgtcaaccatgacctgtgctctttgaaatacagacattatcagaggctcgccgagtctttgttgaacagccctccctctccccgtgctctccaccttccctgatcaatatgcaaatgatcattccttataataccagtttcgaaacatagaactctaccacccagtttagcagttcagtctcaccgggcttttgatataagttgtcgacacattgagggtgtgtgatttggctcagggtacaaaccatttgtccaaaagatgtatcgtaatgtactggtgaacacccccaaaattatgtgggtaaagacagaaacttgcacatgccccacgttgtctgggatcggcttctgcctggcacactttgcagaaataaaccagcgtccacattgatgccactgtttgctacaatgaccacatgcttgattccatcctcatgagcttcacttattggacctctcctgccattcagtggaaaagtggtttccttcctcaattcagcagatatttggtgggggggatgtctaccatgagttgggtgccccattggcttctgggaggagtgtggtactccgtggaaacagagtccctgtcttcatggagttcatattgtaatggaaggaacaaacagaaaaccaaactcctgcaatccatataaatatgcacggtatgtgtgtgacaaggtgacaagttctgcactagaagtttggatatgaggcaccactgagcagactggcagggccaggggagggtggctgcagggcaaggatcagagaaccttcagggggtggggcggggagtgccatttgagctgagacctgaagagtaaggagggaggagccagatggagtgggggaagaggtgtggctattgtagatggagctgtcaggacaagcaaaggcccaggggtgggcggggagatccttctcactgtcccccaggccacccccgtgtggagcagtggttgagtctgcaagtcccatctcttccccaggatcccttcagctgtgtaagccagtgttgcttctccagtcttgagtttggctggaagggatgcagttgtcaaggtgggtactactccataacactctacctaattcactccagatgccccacgccctcactgtaggccatttccccaggcttgcctccagctttgtgaagttgacatgggttgttccccaggaagctgtgctttcccctacaaatcattgagtttgcatttggttgtatccattggaccccatgattctcagccagtgggagtgctgctggtgtctcatggttagagtcagggatgctgctcctcatcctgcagtgcacaggacagtcccccgcaacaaagaatgatctggccccagatgtcaccagagctgaggttgagaagcgcaggtctcaccccactggccactgtggttaatgttcacctggttattcaccaccagaaaggctgccccggtaactcctgttgaataaatttaatcacctaagctcatgtcgtgtatctgcagcatcaaacgtatctcagaaccttggttttatatttcaaaatcttattcttgtttattatcccccatactctgcactttggtactagattaaactacttcagtcatattcacaagagaatctggttaacagaaaattgagtacaagggaaagaaagcatctttcttctaataaattagtgaagggatactaggtatctcctatggcctcagagtttaaaggtgtcaggttttggtttgtttgttctttagctatttgttttttgttttttaatttttttttttgagacagtcttactctgtcacccaggctggagtgcagtgtcgtgatctcggctcactgcaacctccacctcccggatacaggcgattctcctgcctcagcctcctgagtagctgggattacaggcatgcacgtgggtctggctgcattttgtatttttggtagagacagggtttcaccatgttggccaggctggtctccaactcctgacctcaagtgatccacccgcctcagcctcccaaagcactgggattacaggtgtgagccaccgtgcctggcttactttttgtatttttagtagagatggggtttcaccatgttggccaggctggtcttgaactcctgacttcaggtgatccacccacctcggcctcccaaagtgctgagattacaggcgtgagccactgtgcccagtctgttttgttttgttttttaaactgattattaaatcatttaatttcatattggtctgtgtaaatatatttgcaagtgaactttgggtacagttttgctccagtagcattagacaagatgagtccaaatgagattgtcttcattgtgcacttacgaatcactctcctctggccggctgcctctccacactgcagagcaggcctgcagagttggggagccatggtggttgagttccccaagtggcccaggcctcagactgcctctgcataaaagggtgtctgggagaagccgatctaaagcagtaactcggccctatgttaagtcacaaaatatctaaccattacatgcatggtagaaactggtatcttccctgtttctggaaaggaatctgggcagacccaggccgcaaatagtaacgattgggttatctatgctttcagcgatgccatcagaagaaatagtaacactagcttaggaaaaccctctaaatattaggtttaaccatatgaaattgtcaattcttacctataaaaacagcaatctataattcaacctagtacaatatatcatcacctggcacatggtaggttaggttaaaaaaaaatgcctattgaatgagtgaatgaaatcaaccggtgactatagaaaacaccagtctcagcttttgacacagaccacatcaccctcagagaggagaccatgctgtctctccagtttccttttcctttagatgtgagcttcccaaaaacaacagtggccttggaaggggctgctcctggagtctcttgctcatttggtctaagaaggaggctgaggaccagggaccgttgtctgagccaagtctccactccagcacagggcgggggcaacaccccacccaggtaacagttgggcaacgggcacagcaaatcgcagtcctgcttcattaatcctattcattctctttagttccaaaaatacccaagagaatttttatggaaatgacattggatgccaatggtcccaaaaatgcaaggaaaaatagctccttctttgaaatgtctggtattcggggtctggtaggatagggagacgtagtgaagtccaagatcacagtagccttaatgtgaatgttccgcttcagccagagttctcttgggcacttttttttttttttttttgagacggttcacccaggttggagtacagtggtgcaatctcggctcactgcaagctctgcctcagcctccccagtagctgggactacaggtgcccgccaccatgcctcgctaatttttttgtactagagatggggtttcactgtgttagccaggatggtctcgatctcctgaccttgtgatccgcctgcctcggcctcccaaagtgctgggattacaggcgtgagccaccgcgcccggccactcttgggcacttctttacgaaaaccccacataggaaaaaccaggcttccagagtgtctcctgacgtctagttagctattccatttcagagggctccatagcctctcaggaagaatctattctttaaattaaaagctccccaggcatttttaagttgtatgacctgattctcaaaaatgtttcatttataaaaaatgagcatcagctataagatatatatagtgtccgtgcaacttaatgttgggcataccacctcttagaagctaccagctaccatgctgttgttttatgatgtcaacggtgtgtgtgtgtgtgtgtgtgtgtgtgtgtgtgtgacaggcagtgagcagcaactttcaggtgacttaactgcctacatctgtagcttggtgacagtaggtcaaacggtgagttcagggtacagccagaaggcagataaataccgctgtatagaagattctggcagaggctgacagctgctatttccacatctgcttggcacgtcgcttctgagtgatgttgcaagcctcaaaagagatgttccttattttgactcagactatcatgtctttaaaagctgaacagttccttctcttgatgccgtttctctgaactctgacccaggagaggggagaacacttttgatctgccagttttcatcaaggacgctgtttccctcagtgagaggatgaaacccctgacgcccctgctttcccctcccatttcctatgctgtcctgtccccttctgatacctgtccccacacactcatgcacgctgatccactgcgttgcttcccaggccccacccagaaagtgaggaaaggcctgggctgcggtggagcgcaggatgttctctgcggattattcagtgaagtcgagatcttagagaacattgagcataaggcctgcacctatacagctgagggcactgagggtctcgggaaacacagtgatgttctcaagtcagcttttcaaattccgacaagtcctcgttctaggcgtaccatttgatgcacagatctatggacatgtgtgtccataatagccccagagctcctgcctccacagaactggtggctgcatctttggaaagatcgggaaggggcccctcttgcctcatgtgatttcctcactggtggggttaccatgggagtttggagccattggtaaggattccaacacattttcaacgcacaagcttcatgctgacccgccccagccctttgtccttctctcctccactgggcgagtttgccaggcgctcaggcttacttaagacaccctcagtctgagccaaatgtaagaacatgtgctgctgtagcttcccaattttcattcctggcctccagaaaaacatggtgctgtatataacaacacggcttctctgcaagttcagcctaatattttactccatttctctcatcattttggaacattctatttccctgtagaccacctgcctataggaagatagtgattcagacggagcatccacataactgcatctggggaccttatagaggctaaggagcaatccaggatggtggctcagagcacgggttcaaatcccagctctgctacttactagtggtgtgatcttgggcaagttatgtaacctctttgtgcttcagtttcctcatttacatatggagagataatgatgacatctagcagaaaataagcagagaataatagctttgttgctgttgtttttattggagagaaaaggcatttgtgcctggtcagtgagcatcatggaatccaatcaagtgccttctttcattaaaccaaaacagcaggtaggttgtgtgcatttttaagaccttttagaaagtatgcttttatagattaggaatttcagagagaaaagattggacagcttccctaaaaactttgagctatctcattgcaagatttgccctaccaatccgtgcacgaaccctggcccccttcctgatagcaggaggcccaccggtggaagcaagcagctttttaaacgccttcgctgcactcctgcaatgtgcagagacctctggaccaaagaccagagcctactcagcagactcttggttgatgtggacaagctgcctgtgtttcacacggtcgacggtggggaggccaccagggaaaatggaatgtgcagggcttttaaatgtcacgtctggactgtgttggcaggcccatgcagcgctccacaataaacctgtcacaaatgcattgagtcactgggtcctttatttctcatcacggcattctgtggccttgtgttctcttgccagcaaagaatggaacgttcagccccctagacatgccggctgctggattttttaagcaatcatccagcttagataaggggcgtgggctgctggggaatgctgccccaaagcgctgtctccagagcagctgccccaggcatgcttaattccctccctgcccactgtgtgcacccccaagatgcctctcaatatccagacctgcagttccactctgtttgttaggccccccaggagagcgagcctgcagtccgccccagcagaggggaccaggccagggatgcctctttcctctctggagtgttaccttggagtcctgaggccccgtgacaagaccccacacggccgaatcctcagtaacagccctccactgacttggtatccagtgggattcctccctccatcccattctctagggggcagaagcacatctgcccgtcctgtccgcctccccttccatcctgcatcctgtcttctcctctccccgcctcctgctgtgtggcccatgagcccaggagggacccagtctactctgtttacctctcccgctgcccactgagagtcatggctgaggtacatggaaccggcctggtcatagggccgtgctcagcagaacacaagcagaggagatgcctagaactttcaggagcaggtgacaagcagcagagaaatgagtgggggttccagctagtgaaggatggggtggcacagagcatgactgggggccagggatccagccgagaggatggcccgagaaagctctctgaagaggggggatggagacctggctgcgggggaggcacgtccaaagatcaagggggaggagctttctcggcccaagggacagcaagtgcaaaggccagggctgaaggagctgctcctgcccctcacagaaggatgactgagtcttcgacctggtctctctgcacccactctctccttccagcttcccccacgctgcaggcagagagctattctaaaaacatcacttcttatgcttaaaatcatccaggggattcccggtcctccgagataaaagacccgaatctacttggtctgcaaaccctgcctgatctgcccccttctccagccctctaaccttccctctcctcatttattcctatttgtgctgaattttagcacggctcagtcgtcacctcctcgaggaagccttccctaacccatgcattcttctgtgcttgcagaggggaaactgggctgactggttacggagctgctctacaggagcctgctcagtgttctttcttctgccacctttgagtccccgtcatgacccgtcacgaaagtccaggcttttgttgcccccatggctttccaaatggccctgttgaaaacatcccctttgaccctccaaaccactttatggaaaggtccattttcatcatgggagtccctcctcagagagagtcagaacccacatctggtgcccactgtggcatcgtgggcccacgtcagcaggaagggatgggggtgcaggcaggcagtgtgggcaaggagcctcccccagccttagagactgaatgactcaaccccccttgtctacctcccagggatcttgtgtgcccacatgtccaatagggaggtggtgcttgggtccagggacttccttcatcatctagcctcactctgctgtccagtctcacccaacccagaaccttccctccatcatgtcagcctccaccaccaccccagaattcttgagtctcatttaagccactggtaggccccagctgcaaatgcctttgccccacctcccctgcctttcctgcccacctgccttcacctctcccgatttcgctgccacctctcctgctccattaacttgtaacaactcagctcttttctgaattccttatcacacagaaagatgactagatagaaaggctgatacagaaatacatagatactcttacctccccagttagactgtgagctccttggaggcagggcccaaatcttgtggtttgttacatccccattaagacctccatggtaacaacactaatgaacagcgatggtaccttgccttgtgtagttgtcttattgcagggcaccctgcctccctgctgattacaaaccagagggcagggcctacctcccacacgtgcatatccccatggcgcctcactcttgccagttgctcaggaagtgctgtggcagacagtcctgggctgcccttctacctgcctgttgttccacaggcttggtccttcctccccagctaggctgtgaggggcaggacacgtcacagtgttcattctccctgctgcgtgtagcctggaacccagcacaaaacctgtgcttgagtttccctccccaggaggaaaggaaattgtaaacgaggcaccatcgtttacaaaataagttctcatgaaaagaccccaaaacaggaagtgagcttatgaagcataaggattgttcttcatcgttcttataaccaccttcagtactgtctatttatgtatgtatttggttttctgtctcccctaccaaaatggaagccccacaaaagtaggggcccctgcggatctatgcagccgctgtgaatgagcaggaaatgtcatggctcaggttgcctcttgggttcctatgggatcagtttgttaagttaggagagaccgaccccagggagcaggctatgggtgcttagacccttctgaagaaagttccattgagatgagaagtccacctgcccctctggacagctcagagctggtctggcctccagagcttcctgtgggctggggctgtccaggaaccggtcagccaagggtcattttcagagaaggcctggctgccttggcctagactggccactgccatcccccaccagtccccaccagccctgcgctccaaggacaagcacaacctctcagcctgatcttgcaggcatctgctgagagagaaaagcttaaggaccaccctcaggcctgccctttgaaaagccggtggtttcctcctgattccatttcctgacatatcaccagcataggttttattcttgatagggaaggtcaccgtacatcgctgggatctgctgttccattcataagatgagggcgttgagcagagagagtagcctttgaagccatagcccatggctgggggtcagtggtggcagcgtggcctgaggtgcagcttcagagggcccgaagagtggagtgtcagatggtctctgggctcagagagatggcgttctgtggttacagccattgagcctcttggacaatggcttgagtgacctgccatgggctggattcagctcagcagttgtggcagctctcatgatccctgggcctggacggatcagtttccaaatcccacccgcttttcgcgccaggtgtcttgatttccaggccatctttcctctgatctcctggctgtacatgggaaccacacgggagctttgccgataacagatgcctggaccccactccagccagtccggtttagttggtctggggtacagcaggggcactgggatttttaaaaactccttgcgtgaccccagtgtgtggccaaactccagggccacagccccgtccatgccacacacagctgccgcactgatcccctgaaacacagccaagaccttcccagctccgcagccagcgcctcctcgactggacttccccacctgttagggctgaactgtgtccctcagattcacacgttgaagcccaggacatcagaatatgacttcgtttggagataaattctttaaagaggtgatgaagtgaacacgaggctgttagggtgagccctaattccatctgatgggtgctcttaataagagggggaaatgtggacacacagacgctggagatgtgcatgcacagaggaaagaccctgccgaggagagaggcctcaggaggaaccagccctgttgtcaccttgatcttggactttgtatctttagaaccatgaggaagtatatgttgtttaagcggctgggtctgtggcctttgttatggtcgcctgagcagattagcgcaccagcgaggaggaagaggcctccggggaagagcatgagctctagggtcagactccctctgccatttatcaactgacttacccgccctgtgcctcagtttccctgtctgttcagtgggggataacaacagtatagctaccgcataggattcctggtgaggattcaatgagtttgcacatgtgcagcacccggcattgtgagctctgagtggcgttccacctgaacgcccatgactcaccatcacgcagagactgcttccctcctctgcacctgcccccagggctccacgcccccgactccaatttctatttactcccattcttcctccctccatttgaatccctcaccgctgcctgccccctcaccaccgatattagcctgctgaagtccaactcaaattcctcctcccctgctaaatattttcaaatccttctcatcaaaacaacaggcccccttgaattagacctagtatttggccgagtgtggtggctcacgcctgtaatcccagcactttgggaggccgaggcgggcggatcacctgaagtcaggagtttgagaccagcccggccaacatggtgaaaccccgtctctactaaaaatacaaaaattagctgggcgtggtggcatgtgcttgtcccagctacttgggaggctgaggcaggagaatcacttgaactcaggaggcggaggttgcagtgagctgagattgcgccactgcactccagcctgggtaacagagcaagactctgtctaaataacaaaaacaagaacaacaacaacaagaaaaaccctagtatttggctgggcacagtggctcatgcctgtaatcccaacactttgggaggccaaggcagacggatcacttgaggccaggagttgaagaccagcctggccaacatggtgaaaccctgtctctattaaaaatagaaatattagctgggcgtggtggcgcatgcctgtaatcccagctactcgggaggctgaggcacgagaattgcttgatcctgggaggtggaaactgcagtgagccaagattgcaccattgcactctagcctgggcaacagagcaagactctgtctcaaaaaaaaaaaaaaaaaaagacctagtatttgataccacaacagagcaactacaatagtaatttaattgtacatttaaaaataactaaaacagtgtaattggattgtttgtaacacaaaggataaatgcttgaggggacggataccccattcttatgatgtgattattacacattgcatccctgtaccaaaatagctcaggtgcgccataaatatatacacctacaatgtacccacaaaacttaaaaataaaacaaaaaccaacaggctcctccttcatattccaataaaaatgcatttgtactttcattataacatgccagtctgcctttgtacccaaaaaacttattaacaggagctactcatactacaggagagggcacagtgagagcaggaagtcaggggtgggacatagaaggggcctggaatgagctgaagcatacctaccacagaggatgtaaagctgtgccaggaattccagtgcccattatgaagctatgaatgatacaccctttcactctctgaaatgtgcatatttatggaaaattaagagatgatttatccctgagaagaatttgatcttcaccacttctcagcagtaattaaactgcctggcaacccctgtggactggattcccctccttgggagaaaacaaagcttatttggagttacattggcacttttaagcatctgggttacatctgaatggaagcctcccgaggacccagctacatggggcaagatgtgtcaccaggacaggctgggtgggatacctgagctctgctggacccacgagggtctctggtgcctttgggggcattccttcccctctcacctctgtgcccaccggcttctccagaccccattaaaaatcgcatcttgaggatttgcaactccgaggtctcaaggactgataaccgcttggagtgatgccctgtgcaaagtgcctgcaactcagcaaggatccaagttggcctgggactcccaggtctagcaaccagcaggctcccaaaggacaaggacccggactgcctccttctcactgaaccccggggccgagcgtggatgctgcttcacagcaggagtacacaacttcatggcttggagaacgctggggtttcagacatcagctgcagggtaaagggacatagtgtttggccagagaactttcttcacgtcatatccatgtggcttcatctgcttttcctacacgacaggccaccccacacctaccaggagaggcccagggtgttgaagggagtgcagttagattaatttgcccaggagaagccagtgcagctctggggtgcatgggctcacctggcaggagagacttggtccatggggagaagcctgcagtatagatgggacctccaggagcccaagtagcatagaccctgctgatccggggccattgagccagaggatttgggctgaatgtccccagagacaaaagggaaaggtagatcctttcccttaaagatgaaagccatcgcccgggcttgcttattgctctctctcctggtccttccacatgttgtttctgaacatttgttctggcatcacaatccccgtcaccctgtcatctggcccttcccacctttccaccttatctcttgcagtgtctccgcgtcgacctggcacctgggtgaaggcttgctcttgctggtgcccatagcccccagtgtatggtcttgacctccccagccatatggagacccagcctcaggagggcccctcgaggaagcctccccttagcacgaggagttgctcccttctgaggtcctactgtctccaccatcagcacagcacacgggctcttttttcttttcttttttttcttttttttttgagacagagtctcgctctgtcacccaggctggagtgcagtggtgcgacctcagctcactgcaacctccacctcctgggttcaagcgattctcctgcctcagcctcccgagtagctgggattacaggtgcctgtcaccatgcccagctaatttttgtatttttagtagagatgaggtttcaccatgttggccaggctggtcttgaactcctgacctcaagtgatccacctgcctcagcctcccaaagtgctgggattacaggtgtgagccactgcacccggcctgggctctttttttaatgcttgctattttaatttcttttttttttttctcgttttttttcttttcttttcttttctttccttttttttttttttttttttcctgagacaggtgctcgctctgttgcccaggctggagtgcagtggtgcgatcatagctcactgcagcctctatttcctgggctcaggtaatcctcctgcctcagcctcccaagtagctgggattacaggcatgtaccaccatgcatggataattttttaaattttttgtagatatgggtgtctctcactatgttgcccaggctggtcatgaactcctgggctcaggcaatccacccacctctgccttccaaagtactgggattacagacataagccaccaagcccagctgcttgctattaatatttttaatttaattttcctgttgtgtctctcccaagattgtgagtttccctgaggacaaggacagtatcttgcttatttctgcgtctcttggacttcagaggaacttaataaatatttatggaccaccttattgcatattttggcccctttcatacaggaacaaggtctgtttatttgctttgctcaatgggcaacttgctgtgggggctggcttcgttttcaaaattctgcttctcattgggaaaggtagaataattggaggtgtggagatgggtgaggtgcactttttaccctgaatgctctgtagcccttgaaattttaataatcagcatgtgtttatgtattacttttgtaataaaacaagttcttgaaatgatgctgttcatacaaatatcagttgagggaagcaagatgaccttttattggtaaggtttttttttccccgtgattttctccagggcctagactcaaaaaatccttccagaaggccatcacatctctctccatttcgtaaatgtgtctaactaggcaacatctaagggacggcacacagattaggaattttatgtgggctataataggggatcatttgtaaccgcctggagtcatttgcaatattatttcagctgtgtgtggatttcagttagttttgagaatccttctgtcacaccaagatgttcatggaaaaccatttgatgtgttttctcctctcgtttttccctgggaaagggggccagaaaccatgtttatcctaggacccaaaagaggaaaaggccacgtccctccacccctaaagaaaacgcttttatttgaaatgtcttttccatttaccctactttgaataatggagtttttaaactcacttgtttttctaaatattaaattttcaaaggaagaatatttttgagttcaaaatgcctatttcaaatctttaatggttctcttggtctggcattcaccagcaagttttaaagcagcctcccatgggtcaatttgatggctaaaaagatgattccaagccaacatcattggcacataatgtaaagaagactctccccacaaaacttttgcttttcattgtgttctgcagtggccatcagggccatccccctgtctccaggcagggtggtaggtggacctgcgagaggtggaatttggtgggggcaagcagcccagacttgcccagcgcttcccctgacctccaagctccatcagctctgacttgggccttgcaaagtgtttggaccagaggccaacgctacctggagcaggaggccacgcagcagccctccagcttgtccccaactggccccaggctcctgggattcttggacaaatggcccaaatttaccctgaaccttctgctgttgctctggctctgagcttcttcacaacctgcaccgtgtaaaacttgaagactcagaagagcttctgaaatccaaagcaagccaggacttttccccataggtccttctttccgattcctcatcattctacgcgtgtctgctggtccctcgcacctccatgctgcagactggaactctggtcgggttgtcagtttcaagtaacactagtgtttctcaacagggtgctcgtctattggcatttggggtgggcagttctgtgtcctgcatgttgtgggtcatttagcagccctggccagcctgccagattccactatgacaaccaagaacacactctcagccctgggactggagtgggatgcagggcaaacctcagcctttggggagtggggacagtactgacctcaacatggtggggaagagcaccaccttcagcggagggtggggcagtagcaccgcctgctgaggaccaccagtcccccaggttcttagctatgccctggagggcaggagtctctcctcttctgtcctgaatccccagcacccagagtggttagtcctagcctcatagtaggacatcagtaaatatttgcccagtgaatgaataagatctatgaacagtcttcaaaagggcctgtgaacccaatgaaagtgtgccctaaaggtgtgcattgtacacatgtattcgctgcagcaagaacccataacttccctcagattcttcaaggcaactgtggggcatccttaaagggacattcagaaaactggtccagccagtggccactacgggcctgatgtttctgtagctgcaaacatcaccgcaccgtgtttgtgcagtgacttttagagctaccactctgtgtcaatattctaatctccctgcagaagggaccatcctgaacgctccagggactctgcttccgtgagagggcatccaagttgcctaatgcaggggctgcattcagcccttcaacaagaaatggcctgaggcccgggccctttcactcactcacaggagagtggggtaaaaagagggcaggaacaagatatgtttccccccaaactcgagtgtttcttgggtgaccttcccaataaaagtcaaagaactcggagacatcactcagcttgccacaaacccaagctcacacagcagcttggctgaactgaatgagtgagccccgtggcctgcctccttcctgagagttcattgttggtgcagctgttttaataaaagacaatctatgccctgaggcaggaagaacagttgggccaaacccgtggctgagcagagggctcaagctcagacacatctgcagacctgtgcaaaagtgcgagctcaccttgcagccctggagaattctgcttgacctcagggcaggggactctgagtgaggtcgagggtgttgatataatgatgactcatttctgctgctttcccagcattctcctgctggtcttgggttgttcctgtcccagcaagagaagctacagcatccagaaaggacaattggcccagagaacggacaaaaccaagggctggaagcaccacaacccgagagttaacctctaaagcagcaaagcatttgccaagaaatctctgatatcatttggcccagagggatcatacaatttgcagaagctttcagcatataggctagatcagtcatgaccccagataactcccttgagagaagatggaaactcgaggaacccctgctaggccagagcaggcttcttgaacattagtgcgccaaaaaacaatcctctggagagcttgttacatcacagatacccagcccccaactccagagtcacttcagccggggcatctctagcaagctcctaggtgacgctgatgctgccagcctggggaccacgctttgacaaccactggtccccagcagggggttttgcactgtgctccattgtgcccccttgaggggaacagaagggatgggaagaacaagtaaaggggattcagcccggactctcccacctacattcgggacacctctgggtctgtcttccaagtctggcttctgtgattaaataaagaacctctgataaaaaagagaggtgggtccaggcctgcacatgggatgctcccaagaaccaagcctccctcctgctcattccagtgtgtctggggcaggaggctcaaatgttcaaacaaaaccccaaataacaagctaagtgggcagagtcatgagtgagccccacttccagtgcaggcaccatctcagggcagtggagtggcccttcccgtcgggcagccttggcctccatgatggtcttgtgccaggctctctgcagtgggaaggactaccctctctgtggcaagcatgctgctcagctgccccaggggccaggcagcagctttgtccaggagagtgtgcccagtgctgtctggaggcaccctgcatctgcctggtccccaggaccatcagagcctcagcacagccacctcatcctccacaaaccaacctcgacatggataacccatggcctcctggagctcggggatagagcacagcctctgcagcccaagtctcagggtttggctcttgccttcaccacttccaagctgagagacctggggccagtcaacctgtgtaaacctcggtgtcctcgtctgtgaaatggggataattctagtataatacttgagcattaaatgcagttcaccacctgacatggtgtgagccctccagagttttggccaatcgtcattgagtgttttgttttcacattattttcgtgtttctgatgaagcaggagtgtgccgcctgtatcagtttctagggtgccctaacaaacgaccacaaacggggggacttaaaacaataagaatttattgccatacattcctggaggccggaagtctaaaatggaagatgctggcaggtgccagcctcactctgagggctcggggtgtgtcttggtttggaaacacatcactccaggttctgcctgtctgtctctgtcttcttctcataaggacactgatcatatagggtcaggacccaaccctgagtatgactttatcttaatttgattatatatgaaaagactatttccaaataaggtaacgttcacaggtaccagggggtagggcttccacatattactggggaggacacatttcagcccatgaccccactggactggagcaagccctcaggacccagcagccacgaggatcttccgtgtgaagttgtgtgggcttccccagactgtgctaagttctcccaaatggttgtgttttccagggtgttcagacttacatctcttggatatgttgaccccaactgaaagaaagcgacaaggatacatccacgagctcattgtcaccgaggagaactatgtgaatgacctgcagctggtcacagaggtaagggagctggtggggcagggggcacggcagggggcgatgacggagggagaggggagggttccgtcaaggaggtctatgtcctgattctgagcccaagaaactttctgatgtttgaggagcatctggatggcaaatgctataggagattgcgaccgcagagacggttcgttgcttatccatggccaacattgagtcattcccacagagggacagagatcacttagccaagggcaagtgagtccctgagcagttgatggatggagtcatgtgaactgagagtctggagtccacgctctactcagagcagctgcagctcagccaccaaccaggaggtgccatggagccagccacgccgccctcctggcccgcagtgttggcatctggaaatggggggccatctggctgctgtctcgagtcattcctgccatatgttaccctgagacaaacctgtcactgagaatggcaacgtttcctcccaggcccccacaaaagcccctgacctgagtgatgcctcctcatcttgtcagtcctcccagaagggccctggccacctcatccagaactatggggagatgcggagcccggcgctcctgctgctcagcaggccttttgtccacgtccatgggaagatgccatattgggagacagggatttgcagagatggacctgcagtttggagagtgctgtggtagtctggcaaccaccacaccaaacgggtgtgaaaccatcttgtctgatagtcttaacatccaggaaagacgcagcagggctcgccgctgttggaggagtacagggtgggttgttagctgcaggaccaccattaatacttaggaagcattgatgcaaactcaaaaaggtgcccctttctcaaggtgtttgactgttattaaatatgcagttcaggatgtccagggtgcaagtgtcactccttagatatggctcctttttgcactctgcaaaacgcaccaccatatgtggttgccctggtacatgccgggttcaacgtcggcttaaggactcctgtggaataggactcccagggagcagccgcagcccagccaagtttatgtcgaagatgggctgtccccttccctaaagagccttcagaagcgcctcctgtgggagaaaatgacctccttgcaggcgggggcttgcaagtggaacacggggttccactgagatctgtgatttactgagagttgctcaaccacacagagcttggaggggctcattcattttccagagcccaggaggagggcagcactcacccccttgtagcgggcctgcaagtgctgggtctgtccagggtcagcccaggaggctgaggacacagcgatggagtcagtcaccgaggtggccactggcttattagaggagctgccgcctgggctgctcctctcagaaggccctcggtttacctatgcagatgaagggactgtccacagccaccggcacctttaagccccgcttttcacaccggtccagcccctcccagtgcgcaggtgagaccgcttagcctgcgtgcatgacttggtaccggcctccctgcttgtctggtggagttaagacctgtctcctggagacttcagctgccctccttcccctgtaaaacaatgcaggccctgctggggacccccctccggtttccagggcagaggaggggctctctgcttcagaaactgcaggaaagcaggcgttcacctctgggcctctcagccaaggtacagacacctgagccctttccctgctctcagcggatcggcgtgtgagtgtgtgagttttaagctaactgctttctgaactgcttcgttttctgcatctgtagatttttcaaaaacccctgatggagtctgagctgctgacagaaaaagaggttgctatgatttttgtgaactggaaggagctgattatgtgtaatatcaaactactaaagtaagcctctcctctaatccccagcctggcttggcctcctcggctctcatgcactcgcacctctgtgggtctgtgtgtccttcttgcatgctgccctgtgcttctttctggctttttttttttcttctcattgccactcacaaacaccatcacccttttgtgccttcgtgctttctggaaacgcactccgaatctctcattgcaagagtaggtttcctgggcaccccagagcctgctgttgggtgaattactgtggttgtgaatttccagggctagggcgacgctggctcctgatggtgctggctccatgctggggcgtggggctgccccctctacgctttccctcggacgcgggatcccatgggggattattggtcttttgaggcattcttggccctgcagatggaaaaatgtggaactgttcactgcctaacatcagcagttcctcaggatcactccgggaagctggccctaggctggtcgtattttcttccaactttagtttgcagaggcagctccagggccaggagtcaagagacctgggtttggattctgacttactcactgcctttcctttttgagccttagtttccccatctgtaaaatgaaagggttggattcgatcatcacaaagtctcttccaattcttagaaaaaaaaaaaagtcaaaaaccaaaatctgtatccaccacgctctcattgtaacatcacttgctagaacacagattaagtcacagcctgcagggcgcgtgatattccctgctgggaggaagggccacccacttcctgggcccgaggatggagggcaggctccagagccttgcgtccattcctgatcttcatccgtgtcattgggaagtccccatttcctaaatgtggtctctgcattgttcttataaggtaatttcaggtccccactttcctgagcgtgtgtttgggagtggatggagggatggagaggaggtgtggagaggtggacatgaagaaagatacataatgtctgctggcttggtgctctagaagacgaatgatccaaggtgacatcaggcaggcttttagagaaggtctggactccgttgcccgcgccccctgccacccgatgccgtggaagcctttcgaacttaggtctggtgtcacacccttgggctcacatccgctattgcctctggctgtgtgtcttctggcaggtcactttggtccctgggcctcagtgttctcgtctacatagacgatagctgggcacagtggctcatgcctgtaatcccagtgctttgggaggccaaggtgggtggatcacttgaggtcaggagtttgagaccagcctgggcaacatggtgaaaccccatctgtaccaaaaatacaaaaagtagccgggtgtggttgtgggtgcctgtaatcccagctactagggaggctgaggcagaagaatcgcttgaacccgggaggcagaggttgtagtaagccaagatcgcaccactgcactccagcctgggccacgggagtgaaaccctgtctcaaaaaaagaaaaaaaaaaaaaaaaagaaaagaaaatatacctgtaagttaaaacctttttccttgggcagctatcagtgggggctgggggaggcgggagatgtttctgagcttcccaagtagcccttagagagggcttcccccacttcagggttggcctgagggaaactggtgctggcctcagctccccatacctctctgttgtcttttaacccccatctgggaagaagcagcctctttcttgagctgtgtggggggccaggcctgcgtgcttcttcctcctgtcggctctgacttgctccacagttgtggaggtgggaactgacagccctgttacggctgaagcagcaaagctcagagaggctgagtgacttccctaaagtcacacagtagggtggctgctctgtggatgatgcctaggtcccggaatagagactccgcccagtcctgcccccgtggaaaaaaacatgggcccagaagtcagacatcccaagtttttgtctgggctccggccccttctaactagttttgggcattaaggtggcagtcatggtgcttgtcctgcctaccatgcacggtcattctgagagcaagggaatcaggtgtcccaggggcacgccgtccatcagggggctgatgtgtacaggggctgctggcttccctccatcccaaggttctctatccccgttcctctgattcccggattagcttgtttggactaactggctcatgtcttcatcctccagataaaatcttatgttgaaccgtagccttctggggacctgatttctttttcttcttttctgcattttactagaaaaaatctcaaacatacagaaaatttgaaagaattgtagagtgaacacccacatcataaactggacaaaaaacattgtgctgtatttgggtggctgcatagacataatttcttcatgccaaggaataactgtgatgaggggagatcgagggctcctagcagccgagagagggaggcatttgaggataagaagttaaggcagcaatccctggagtgccaccagtgagcggccatatgtctgctactcctgatcctacagtccttgtatttggggggtggggcagggggtagggcagttatcaaacaagtcaacaataaataaataacatgaaaataaaaagggctaactggaacacatggacttcctactaatgatgcctcattgagggttagagcaaatggctggctctcttgcgaggaagctgagacctgagaaatgtgcctttcatagacaaggtagggccagacaggtctagaacctttttatatccagagcctggagcaggaccctcaggacagctgtcagaaatgatggcagaagggccgggtgcggtggctcatgcctgttatcccagcactttgggaggccgaggcgggtggatcatgaggtcaggagattgagaccatcctggataacacggtgaaaccccacatctactaaaaatacaaaaaaatagccaggcgtggtggcgggcgcctgtagtcccagctactcgggaggctgaggcaggagaatggtgtgaacctgggaggtggagtttgcagtgagctgagatcgcaccactgcactccagcctgggcgacagagtgagactccgtctcaaaaaataaataaataaataaataaaaaagaaacgtcatctctactaaaaaaaaaaaaaaaaaaaaaaagagctgtgcgtggtggcgcatgcctgtaatacaaactactcaggagtctgaggcagaagaattgcttgaacccggtgggggcagaggctgcagtaaaccaagatcgtgccactgcacttcagcctgggcaacagagtgagactgtgtcacaaaaaaaaaaaaaaaaaaaaaaaatgatagcagaagggaagcagaagtgaggtggggtgaccaacccaggtttggggaactgttttttatcaagaggctttcctgtcccctcgatggaaaaagaaaagaaaaaaaaaataagagcttgtcccaaaacagtgtttttcttaaatatctgactcatcttctttttaacttaagaagaatggattccattttatcttgtttaagcagaaaatgaaggaaaaataaaaaataaaaatcagtttggggtaatgacagatggtgagaaagaagaagaaaaggatgtggggttgggagaaggagaagagggaaggagagagggcatggagcagatggtgggaagtccagcagggcgggaagtgcagaggctgaggctgggaccagcagggaaaggcttgagggcgagatggcgggagcagggcagccgcgtctgggaagatgggcaggtgcccagagcagcttggaggcagtcgtggcgggaggtgggttggggcctctgaggctgtggtcccaaccatgggctctggagtcagacctgggttccagggttacctctgtcacctattagctctgagacttgggtcaagtcactgaatttctgcatgcctgagtttccccaataggaaatggggataataatatatgtaaaactctgtttgacacataggaagcattaataaatgctagttccatgactgtccacttggtctgcagacttcagagggttacagacactcatgtgttcagcaatcattgagcgctctttgaaacatttgttagccagttaattgccttttgcagttcaagtcctctcatctgtaaacctttctaggagactgccgatcagctcaccgcaagcagagtactcttagggctgtggctgcagcagccgagtcacatgatccctgggcctggtaacaccttgcggtcttcataagtctttgcctatacagtagaccatcctggacgaagacccatgactgaatctaataggtgcctagtccatagtaaatcaggctttaattttaggcctgtctgctggttgggtaactctgttctacaagtgtgggtctgcagaacccaggaactaattcctcaagacaatcactgtctgcagatgctctttcttcttttcttttcttcttgtctccttcatcctttaataaaaaacaggccagcggccggggccgggcacggtggctcatgcctataatcccagcactttgggaggccaaggtgggtggatcacttgaggtcagcagttcgagaccagcctggccaacatggcgaaaccccatctctactaaaaaaataaaaattagctgggcatggtggcgggtgcctgtagtcccagccactcgggagactgaggtggaggttgtagagctgggattgcaccactgcactccagcctgggctacagagtgagactctgtctcaaacaaaacaaaacaaaataggagaaggaaagggtgaaagtactttttattcacttgttaaaaaaactactcctcataggaaaatgatggaatgatggaatttcttcctgtttccattcattgcaagtttataacgtggctatccagggctctcatccccccaaattattggtgtcatcacccttgagcacatttttgctcgttgtggtatttcacaccaacccctcaatggggcagtggcctttgggccatcctgaggacaccaagctgccactgctccccacaccccagaggcagccagtgctgatctccccatgagggcatccacttcaggtggaatcgctgactgctcacaccacatcatttatggtccctaagtttttctccttggcttgcccggtccaagggactttattttagccaaaaatgtgggagaaagaaaagaaagtgatctgaagtttttaaagcctaatataaatattgcagagcttccttggaattcaatagcccgccccgtacctcaaaggcttctccaacatgaccatgaaagcagccaaaggcattcaatagggacatcctcccagccttgtgttaaagtcataggttataccattttgttccatctacccatccatccacccatgatcactaactaggatagctgaacacacccatggcttcatgttgtggtcctgccatgtagtaccttgctgtccttaccgtgtataagctcagtgccatgcccttcttccagatgctggtgttaagggttcacatgttgaagttgggagaggggaagcacagtcctagttaccatagctctgagcactcacactgcaggcagaccccagaacacacacttcccagtcccatcaacacctctcctgaattccaggatatacattttttgggttcattggcccattatcatagtaatagacctcttttccgaactcctcttaatttagttaactcagctctagcaatgaagcagcgaatcacagagatacttcaaacagtcatttatacctggcttttgctgaatctcatgggattattttgccaaggcatttgttttgccatcttaattatgttctttttagccaaaaatcatccttccccatcctctggcaatagcaacttcccttgggcagaagtgtctcctggaaataggatcagtgctcaggccacatcaacctggggctttcaccaccgataatctgtgtagtgaggcatcgacacaggggacccatttgagttgttcaagaaaaaaactccatatttctgcacaagaaaaacaaattgtaacaaacagccactctgccaaagaaaaatgctctggtgctacctctctgtagccctagactcatttctttctccattccttgtctcccaaatagatcctttagtggcccttaaggctgtgcccctcacacacattctgtttctgtgcaacctaagtgtgctgtggtgctgtcagatagcgtgaaagcagggggctcacctcccgtgtttccgtgcagagcgctgagagtccgcaagaagatgtccggggagaagatgcctgtgaagatgattggagacatcctgagcgcacagctgccgcacatgcagccctacatccgcttctgcagccgccagctcaacggggctgccctgatccagcagaagacggatgaggccccagacttcaaggagttcgtcaaagtaaggagccaggctgtgcagagactgggccccagagtggcgatctttgggcagctggatgtgtgaggggctaattcaaaagtctgcaagagtgttcccactagaggccaacagggcctagggtcttggctaagccttaggggactggcactcactggcaagtgtggctgtcaccaaaggggtgggcttggagaggaggggtgaaccctgggcttggaagctttgaaagtgtctttagggatctgttttccagatgctattggtgttatttggatgcatgtttaaatctttcatttcatttgcaaggcccaggcaggtcttagatttcctcttgtgtttaatcgccacatcctcagttctttgctggtctctgcccttcacttgcagagggaatggccaggactcccagtggccccttcattcctttcgcagttggttctgcttgatgtgctcccgccttagacagcctgtgggagtcagtgtgggatgccaggacctcttccttggaggtagcagggatctggagagttgggagtccaccaggggatgtttggggaggtaatgcggatactgctggaagacctgcagctctgggacttggccttggccagtgtgggtctctgctggccgtgctgggccattcaaacagcccccacatctcctggagaaaaaaaggaggaagagaataaaatagcttctgtgaaacaggtatcttttgatgaataaacaacaaaataataataacaggcatatctttggatctcatgcattttggagacaggccatcctcacctgtcctagagtggtgcttgtggaatcactgtggtgaggcacaagcgcagcctcttcttggtcagagcctcatgtgagcttgttgtttctgcctctcatggtgtttctcagcctagacttgccagccaaggcatggggcactctgaggtcattccaaggggagaaagattgctaagaaggaggccttgggtggatggagacgagagagcagatgctgagctgctgggcgccatggaccacctagggtttcagccaagggctgggctcttcctaggcccgagcaagatgagttcattgttggatgcacttgaacttcaggaaagtgctgacaccagcccagagcaggggcctcattgtccctccccgcccctctcctcttcacctctccccacctcctctcagtgggaatgtggcacgtcgttgccagctgcgaggtgttcctggaatgatggtgtccacagctggagcaggtcccggtccctggagacagttatcaggtctcagggctccagtcaatgcagctgcccgtttctaaggcattaaaccagaccacagcctttgacagctaagtggccagaccctgaaactggagtcttgacccccgttgtctgagctcctctttctcagccctgcctggagttcccagaggcacgtgcaggctccactcaaaactagacaatgagatttagcccttccagcagttctggggtgtaaggggaatttttcctctaaccgtatagtcttgtgactcttgttcctgggaatgttataaagtttctgcagacatccagacgaaatattctgtgtaaagccagaatctcatctctgtgcataaggaaccatgcatgccatggagggtatgctgaatccagagtgcagggcttaaccctgctggctgagtcacatctgtgggtctccattctccatctggaaagtgtgtcatcctggacagggtaactagtcaggcccttccaaccccaggtctctcagttgtcatccagataaatgagataatgggtggagagtcctcactgacattagtattgatgtcactaactttggattttgcaagtttcttaagtacatttaaaaacatctcatttcagagattggcaatggatcctcggtgtaaagggatgccactctctagttttatactgaagcctatgcaacgggtaacaagatacccactgatcattaaaaatgtaagtacctgtcttgccttttcaagcaggggacggctttctctgcattggagagggctggggtcatggacaagattcccagtgaacatatctggtaactgttgtgtagaaagcacgagacaacaaggtgtcacagaggtctgcttggtaactcagaaagaaaagctggtttatcacgcaaagagctggctgggcacggtggcccgcgcctgtaatcccagcactttgggaggccgaggtgggcagatcgcttgagcccagaagttcaagcccagcctgggcagcataatgagaccctatctctattaaaaaaaaaaaaaaaaaagagagctaatactgtgtccggaattggtgggttcttggtctcactgacttcaagaatgaagccgcagaccctcgcggtgagtgttacagctcttaaggtggcgcgtctggagtttgttccttctgatgttcagatgtgttcggagtttcttccttctggtgggttcgtggtctcgctggctcaagagtgaagctgcagaccttcgcggtgagtgttacagctcttaaggcagcgcgtctggagttgttcgttcctcccggtgggctcgtggtctcgctagctcaggagtgaagctgcagactttcgcggtgttacagctcataaaagcagtgtggacccaaagagtgagcagcagcaagatttattgcaaagagtgaaagaacaaagcttccacggtgtggaaagggaccgagccggttgccactgctggctcgggcagcctgcttttattctcttatctggccccacccacatcctgctgattggtagagcccagtggcctgttttgacagggggctgattggtgcctttacaatccctgagctagacataaagattctccacgtccccaccagactcaggagcctagctggcttcacccagtggatcccacaccggggctgcagctggagctgcctgccagtctcgcgccatgcactcgcactcctcaggccttgggtggtcgatgggactgggcgccgtggagcagggggcggcgctcgtcggggaggctcgggctgcacaggaacccacggaggcaggggaaggctcaggcatggcgggctgcagtcccgagccctgccccgcgggaaggcagctaaggcccgctgagaaatcgagcgcagcgccggtgggctggcactgctgggggacccagtacaccctccgcagccgctggcccgggtgctaagtccctcattgcccggagccagcagggccggccggctgctccgagtgcggggcacgccaagcccacgcccacccggaactccagctggcccgcaagcgccgcacgcagccccggttcctgctcgcgcctctccctccacacctccctgcaagctgagggagggggcttcggccttggccagcccagaagggggctcccagagtgcagtggtgggctgaagggctcctcaagtgctgccaaagtgggagcccaggcagaggaggcaccgagagcgagcgagggctgtgaggactgccagcacgctgtcacctctcaatactgcacagccttcagatgtgtgaccaagtggcttctaccttgtaagtcagaaaatgagagcttagtcgttgattctttttttaatttttttttttctagaagaaaataacatggaatcacagaaacagtctgtggtctgtgcctttctcccttgactctttcttaaagacaggcccagtgcctctaggccttgattttcttagcagaaaagagaaagaaacgtaatgctacgacctgtcttcagaaggccattgtgaaacactgtattagtccattctcacactgttgtaaaggactgcccaagactgggtaattaataaggaaagaggtttaattgactcagttccacatggctggggaggactcaggaaacttacaatcatggtggaaggggaagcaaacacatccttcttcacataatggcaagaaggagaagaatgggagcccagcgaagggggaaaccccttacaaaaccatcagatattgtgagaactcactcactctcactagaacaggatgggggaagccaccccaacgattcaattatctccacctggtctctcccacaacatgtgggaattatgggaactacaattcaagatgagatttgggtggaggcgcagccaaaccatgtcagacactgtgtgttgatattagatgattgttcttctcctgtcactttgagaaagccgataccaaaagaaaaaagaaagaacaaaattagggtttcagtgtccccacctgtaaaatgagtgaacagatttagatgtcctctgagcctatgtttgtaaaaccacagggagtatagctcctggaaagaggttttagatctggttccttttaatggaaaatggtgtttagaaactcagatgtgggcactggcgtgctcattgctactggggtgattttgttttgtgttcctctcggtggcagagctgggaaatatatgaatgtcttttcatgcacacatatttacatatgccaatgtatatacacatatatttatatttatttctagatccatctatccatgtatattagaactcatgaattcacaccagtacctcctattctaatccaatactgcagaattttttccagcctttccccttctgcctttgtaactccctactctgtgaagagcctggctctcattatcctcaatgtgtttccttatttgctcagtcttcttacatgtgacaaaactccctcccacataagccatctcctcagtccagccccagctcaactccacaaaatacactgtggatctttggctgagttaaatacttagttttgaagtaagttttcaacttactgttttctctcttccaacaccacagttactatttaattagctcagtacttctcttttttctcccaatgtttaattgcaaattgaagttgaaaacaagcttttaaaataggtgttctatatctagccaatgggagaaaaactaaaacaagaaaaggactgcatggcccaaatatttaaaagggggaaaaaaactcattatttgcagaaacacgattgatttcttccagagcacccacaaaaatgaactgaaaaccagctgaactaagaagagaattgaaaacagtggtcagctatgagatacatatgaaatctgctaaagtactaatactaaatatttttatgatactgatgtggagaaattcttagcatggtctcaaagacatgctaatcctaaacttaaaggatttagatcatagcaacctaaaaaatacccaaactttcatctgggcatagtggctcacacccataataccagcactttggaagaccaagacgggtagatcacttgaggtcaggagttcaagactagcctggccaacagggtgagaccctgtctctactaaaaacacagaaaaaattagccgggagtgatggtgtgtcaggtttgaggcccagctgaggtctgaggggagtgggtgaacgtggggcagggagctggaagaacacttgagagacagcaggtagatgggacatggcacagaattgtgcacctgcactctaatccccctgagtcatgcaggctgtttacatctgcgtatgcctgcctggttgcagcacagccatgttccctacatgatgtgtatctgtaatcccagctgctcgagaggctgaggcaggagaatatcttgaacctggcaggcagaggttgcagtgagccaagatcacaccacagcactccagcctgggtgacagagtgggactctgtctcaaaaaaaaaacaaaaaacaaaaacccaaattttattctggggaacaacgtatatgttcattaatgggaatggttaaataattatggtagatctgtactatgaaaatatttaaaaagatacagagcaacttctactcatgtattagtgtggaaagacactgagaaaatgctgttatgtgaaaaagcaacactaaactcactgagcaatcctatggtatgatgcattttgcaagaagaggggaaagagctatgattgagtcactgcactccagcctgggtgacagagtgaaactctgtctcaaaaaaacaaaaaaaaaaacaaaaaacaaaaaggccggatgtggtggctcacacttgtaatcccagcactttgggaggccgaggcaggcagatcccgaggtcaagagatcaagatcatcctggccaacatggtgaagcccgtctctactaaaaatacaaaaattagctgggcatggtggtgcatgcctgtagtcccagctactcaggaggctgaggcaggagaattgcttaaacccacgaggtgaaagttgcagtgagccgagatcgcgccactgcactccagcctggcgacagagcgagactcagtctcaaaaaaaaaaaaagaaaagatagaatatagaacttgaagttgctgagaggcagtaggcagtatggaatagcagtgaagagcacatagcctggagccaggctggctggggtttgaatcttgctacttaaccactgtgtgctcttgggcaagttgggcctcagtttcttgtctgtaaaatagggacactgatagtacctactgcatagtgatgtgggaattaactgagttaatgtatgcaaagtggctcatactaggcagtatataaatgttagttttatcattgagaacacttatgcgctaaatgtacaaaaagttcacactcacaggtaataaaagaaaatacataacaaaacaagaaaatactttgattttggcttgccagatgagcgtatattgaaaagattataggtcccagtgttggcaaagatctgggtggaagttaaattgatacagccttttttggaaggcgattatagatcaaactataattcctctttggctcagcaattccacctctaggaatttattctaaggaaataatttaagaaatattgaaaagttggaagcaacataaagttttatgggaaggtaactatttagacgcattgtgctcaataacgtgctcaatgaatattggggtctaccccaataatgatatattataaaaccctcaaaatgataatatgtatgaaatggacatggaacattgtactataaagcaatgtatgaaatagtacagtataaaatggtagtttttgtaaaatggtagtatgatccaatttttatttttatttttatttacttttttttgagacagagtctcgctctgtcacccagtctggagtgcagtggcacgatctcagctcactgcaatgtccgcctcctgggttcaagtgattctcctgcctcacccttctgagtagctgaaaccacaggcaggtacaatcacgcccggctaatttttgtgtttttagtggagacggggtttgaccatgttggccaggcttgtctcaaactcctgacttcaagtgatcatcctgcttcggcctcccaaagcaatttttattcttgaaataatggggagattattagtgatttttaggttctttataactttttgaattttctaaattttgtacattgtacaatattacttttgtcattagaaaaattgataaacctgtttgaattttgaaactaaacaaaacaaatgaatttactcaagccagctgggtgggttcctagcctgtagtagtggttctcagatttgactgcatgttagaacatctggaaacctctagaaaacccctaagcctgagtttcaccctccagggattttgatttagtcatggatgaggcctcagattttccaaaaggattctaacgtacagtcaggattggcccagaggttggggttgttgcttggaattgatttgtggactcacaagacatagaaaacagtgtgtgtttttctccatttgagcatctacttaggactttaaaccacggtatgcctttgggataagatattcagagtcagggccatttacattgtttgtatgtggacaaggcctgggcaaatatgccctcggcattctcctggtacacttcaaaggtggcttagggtctttcttcattctccagcacagggtgataattgtttttaggggcctggaagtcctttgaggatctgatggtaatcactgttgcttattgagcactttctaagggccaggtgctttgccaagaggtccacgtgtctcatttagttctccacacaccatataaaggaggctattaacctctccatttctcatgcgaggaacctgagactcagaacatttatgtgggccaggcgtggtggctcacgcctgtaatccccgcactttgggaggctgaggcaggcagatcacttgaggccaggagtttgagatcagtctggccaacatggcgagacccccgtctccactaaaaatacaaaaattagctgggcatggtggcgcacacctgttgtcccagctactcaggaagctgtggcaggaggattgcttcaacctgggaggcagaggttgcagtgagatgagatcgtgccactgttctccagcctgggtgacagaacgagacaaaaagaacatttatggctgggtgcggtggctcgcgcctgtaatcccagcactttgggaggccgaggcaggcagaacatctgaggtcaggagttcaagaccagcctggccagcatggtgaaacccccatctctactaaaaatacaaaaattagccaggcgtggtggctgtagtcccagctactcgggaggctgaggcagaagaattgcttgaaacccgggaggcagaggttgcagtgagccgagatagcgccactgcattccagcctgggcaacaagagcaaaactccgtctcaaaaaaaaaaaaaaaaaaaaaagaacatttatataaccaacccaaatcatgggtggtctgtggtggggcagggatttaaattcaggaggtccagctccggagctggcattcttagccaccaccccaaatggtctgcttagaaaagcgcacacttgctctgatgcacccgtctgcatgtggttccagaggcgcgtggacccaggaaggagccacccttgctgcagccaccgctcctcttatgccccaggctgcatgctaagcatagactgcgctgtccctgccctgccctccaagggcacctgttggctcttagaccctcatcagtgggttgatggaacactgcacatcaaatgccagaattgcattgtatgttccccaagtgagtgaacaggtgggaaaatagcacggaactgggcctgggatgcctgggctctgctcctggtctcagggactagtttattcctctgtgaaacagggtgaatattttctttttctttctttttttttttttgagacggagcctctctccgttgctgggctggagtgcagtggcgcaatcttggctcactacaacctctgcctcctgggttcaagcgattcttctgcctcagccccccgagtagctgggacgacaggcatgcgccaccacgcccagctaatttttgtatttttaatagagatggggtttcaccatgttggccaggatggtctcgatctcttgaccttgtgatctgcccaccttggcctcccgaagtgctgggattacaggcgtgagccactgtgcccggccaagggtaaatattttcaaagagaaactctaagggccccatggttatatgtacacactgtgatcctgtgagtctgcatgtgtggcttggggtccaccctgcgatgttaacattttgccggacagatcacatagcttgccctggacattcagggtgtggggctggactgagacctcaaggatgggaccattcactgcttcccgcaatgccacccactggagccatcaaggagtggccgtcatctgctacgtgattgccatgtgggtgctcagagctgcgattgctcaagtgggcgccgtccatgaaaggatggtgccctgccccgctgggcctggtcctgcaggaccctggatcacaggcccgcccacattgcctaaaaggaggtggttgtttttattctcctgtgtagatcctggaaaacacccctgaaaaccacccggaccacagccacttgaagcacgccctggagaaggcggaagagctctgttcccaggtgaacgaaggggtgcgggagaaggagaactctgaccggctggagtggatccaggcccacgtgcagtgtgaaggcctgtctgaggtagccaaccttggggctgggccctggtctcccccggcagagcctcgcctgccagcctggaggaggacaaagaaaagcatgaaccattctcctccccagccgatagcatcctcatttccatccagctgcttctcatctgctgtttcatccacccactgagtatttatttatttatttgagatagagtctcactctgttgcccaggttggagtgcagtggcaccatctcagctcactgcaacctccgcctccccggttccagtgattctcctgcctcagcctcctgaatagctgggactacaggcacacgccactacacccggctaatttttgtatttttagtagagatggggtttcccgtgttggccaggctggtcttgaactcctggcctcaggtgatctgcccacctcggcctcccaaagtgctgggattacaggcatgagccaccgcgcctggccatccactgagtttctaatttaaattatatcatttcccattgccagaagttctatttattttctcctgtctgctgatttctttctttctctttctccctttttctttcctctttctttctttccttctttctttctttctttctttctttctttctttctttctttctttctttctctctctccctctttctttctttccttccttccttctctctttctccttccttcctctcttctttttctctttctttccttctctctctctttcttctccttccttcctctcttctttttctctctttctttccttctctctctctttctttctccttccttccttccttccttctttccttccttcctttctccttctcttctcttcttttttcttttctttctttcaacaggatcttgctctgtcacccaggctgctggaatgcagtggcacaatcccagttcaatgcagcctggaccacctgagctcaagtgatcttcccacttcagcatcccaagtagctgggaccacaggtgcatgccaccatgcccagctatgctggtttctttcttgtatcttgttttttgctcaaatgttaatccttcttatttatttcttaacacattttaaacatagatattcctggccaggtgccgtgactcacgcctgtaatcccagtgctttgggaagtggaggcaggaggctagtttgtgttcaagatcagcctggaaacagagtgagaccctgtctatacaaaaaaataaaaagtaaattagctgggtgcagtggttcacacttgaggtgggaggattgcttgagcccaggagttcaagggtaaggtgagctatgatcacgctactatactccagcctgggcaacagagcagaatgtgtctcaaaacaacaaacagatatagatatagatgtagatatagatatagatatagaacccataacctgaagttatgggtgttattgttttgtctgttgtttctgccagctcttgctaaacttactaccttgtttcttgtattacgatttttgactgtgaactaaatgttccttagaactttacctgtgggcaccttttttttttttgaaatggagtctcgctctgtcacccagggtggagtgcagtggtgtgatctcggctccccgcaacctctgcctcccaggttcaagcagttctcctgcctcagcctcaaaagtagctgggattacaggtgcgcaccaccatgcctggctaatttttatatttttaggagagacagggtttcaccatgttgaccagtctggtctcgaactcctggcctcagaagatccacctgcctcagcctcccaaagtgctgggattacaggcgtgattaccgcacctggcccacctgcaggcatctttattgtctgaagttgtattccttctggaaggactgttattgtgattatccaaaactatgtttagaggggtttgggcatcacagcccttgtgtgaatcgtggttgtaaacttgcgtgagagctacctgataaagcacacattctcagggcacgttttccttcactacaccaaggtcaaaaacagaaatgttttattgctcatcccctctgagcttgagtttacctgtcactcctcctctgggttcatctttttgtgaagatctcctagtagacccctcacgttggctctggatgcacctgtttctgcaccctatgtagtgagtaaaatgcaaggtcagcgtcagcagattcaagagagaccctcaaagctatagtggcactggctttcggtgatcttccaaggttcctattttcattctgttttcagcctctgcaaatttcttactttgtttctattttgtgtgtgtgtgtgtgtgtgtgtgtgtgtgtgtgtgccagttttcttggagttaaaaagtggatttttgcatttttctgtttttttaaagtttttgttgggtgagtcattctgagtatctagtccactctacttccagcaacagaagtctctctctgtctctctttctctttctctctctctttgtgtgtgtgtgtgtgtgtgtgtgtgtgtgtgtgtgtgtttgttttagtcagggtctcactctgttgcccaggctggagtgcagtggcacaaactcagctcactgcagcctcaacctcctcgagtgattctcccatctcagctttccaagtagctgggactacaggcattggccaccatgcccagctaatgattctattttttttgtagagacaaggactcaccatgttgcccaggctggtctcaaactcctgagctcaagcgatctgcccgccttaacctcccaaagtgctgggattacaggtgtgagccaccacgcctggccagaagcctctcatttggtttctaattttcttcttttcacttaacctttcctttggtctcattcattctttttgcccattttttctctctgtttctgtatacacatgtgcttgtgcctgtacacacatacatacatgcatgtatgcacacacatacaccattcactagggtttcccaaaatgaccagcgagaatgtgtctccctcatccactcctcctgtggtttcttccctctcataagctgcaaaggccatcaccacctgagggagtcaccatgactggttcctccacggccccatctcctgtccaccttcagtgttggtgtgggatgagcaaaggtgtggaagcagccccgtggaagccgagaggacagctgtgggctcccattttgggattttgtgttgctctgctgtcagtgggtggctcatttattcgctcatcatcattcattcaataagcacttagtgagtaaccacccatgtgccacggctcagtactaaaccctgggacataaaaacaaataagatgtgactcccactctcgaggagcttatggtccaggaggaagctgggggttaaaccaacatttacaacaagatgtgaggggtaaggaggcagagctaggtgccaagtgctgtggcgacatgtgacaggagcaagggacagttgtacgggggactctcgggccctggaggtgatgcttgactgcgtgttgcaggatgaagcattggaggcaggccaagcaccgtgtctcaggcctgtaatcccagcactttgagaggccaaggcaggaggatcccttgaggccagaagttcaagaccagcctgggcaacatagtgagaccctgtctctacaaaaaatgtttagaaaactaaccaggtgtggtggcatgcacctgtagtctcagctacttgggaggctgaggcaggaggatcgcttgagcccaggagtttgaggctgcagtgagccatgatcgcaccactatactccaacgtgggcaacagagcaagaccctgtctcagaaaaaaaagaaagattgaggcagggcattaggagtggaggaccattctgagattctgagcagggcattggtgaggattgcagaggaatgatgggccacagggctgcagggcaggctgaggcccagccgaggaaggcctgtgtataatgcaaaggaacattaacttgatcctgaagacaagggactcaagcagcccctgcactgccacgcagaaatgccgacacacagtcatgtgcactttagaaagggcccttccccgactctgacagctgccatcagagggacacagtgaggccgggatctgaagatgttaaagtaaaatcagttgtcatccttctttttttttgagacagagtctcactctcttacccaagctggagtgcagaggtgcgatctcggctcactgcaacctccacctcatgggttcaagagattctcctgcctcagcttcccgagtagctggaactataggggcccagaaccacacccagctaatttttgtatttttagtagagacggggtttcgccatgttggccaggctggtctccaactcctgaactcaggtgatctgcccacctcggcctcccaaagtgttgggattacaggtgtgatccactgcatccagcctagttcttgtgctttgattttttcagcttacatcccccctttgccatcagatggctgtccttcttggtcagtcttcctggctatcatgcacagcgtcgttgttgtcttgatgatgttcatggtgatgggaaggggatgtgttgacttctgtctcctgacctaggatcacggtgtggaccatgcgtggcccaggtctggacacacaccagtgattaagtttcaaacagatgctgtttttggcattcctgtctgaagatagagaagtttaaatactgttcccagttcatgcatattcagtgttatcttggccaattagaggctttgagtatgaatgaacgagagcacctttatgtcattggatccaatgacacttgccttctctggattatttgcgcccacgtggcttgaaccctgtcttggcaagcaggaagggctggttggtctccaggctcctgcctggagtgcagaggtgaagaatgttctttgaaggttcctgttgtggcaccaccttcggtctttcttgggctctcagaccctccacaggaggtcagaggtcatctttcctcctcgtggctgacagcagagtgcagtggcccctttccagctgcctttagctctccactcacagaagtgccactgtttctcctgtattggagatggacaggtggccatcagcttcttttgggggacacatgttacgaacctatcactccttcacaaatactctcttcagagaggggtccatagggctcgtagctcaggacagagctccggagcgccccccaggccaattgtgtgggcagatggggagcgtgaggggctggcctcggactgggtcatcttactcctggcgcgcagccatggccttgctatccttggcctctccccttgctgtcaaaaagggggcctctgtgggatcatctccacctcagtgccctctgccccttcagaacctagtggaggtgatggacccccgagaggtgttagagccgcgtttcagcgcccaccgtgtctctaagggtcagtggagggagggagctgttcccttcctgtttgctgagcgggtgagtcgggtgaggtttcatgtgcgcagtacagtgtctgttctgtttggcactggagggtcgctcaacaccactgatttacagctgggtatggtggctcacgccggtaatcccagcactttgggaggccaaggcaggtggatcacgaggtcaggagattgagaccatcctggctaacatggtgaaaccccgtctctactaaaaatacaaaaaattagccgggcgtggtcgcgagcacctgtagtcccagctacccgggaggctgaggcaggagaatggcgtcaacccgggaggcggagcttgcagtgagcagagattgtgccactgcactccagcctgggcgacagagtgagactctgtctcaaaaaaaaaaaaaaaaaaaaaattaacaccactgatttgtgcagtcacacacatgccaggggcccggactgcagttgtgccttggaaggcagcatttgtccatggaattggagagagacgggggctgctgctttccagaagctcaaaggactgtctgaatctgtgtggggttttctccctggagctgtttcatgcacagaccctgcatagagcagggagtccccaaggtgggagccaggtgggcacttttctttctgctgccccatttccccagtaaataaaaaagagaaatggccaagcccagtggctcacacctgtaatcccagtattttgggagcttgaggtggaacgatcgcttgaagtcagaagttcaagaccagcctgggcaaagtagggagaccccatctctacaaaagtttttttcacatgtgttggggggctgagatgggagaattgcttgaacctgggaggtcaaggctacctgaactatgatcacaccactgcactccagcctgggcaacatagtgagaccctgtctcaaaaaaaaaaaaaaaaaagaaaagaaaaaacacaccagttgcaccataagacactggcatgctcctagaggaaaagccttagaaattaccattgagactcttcttgatacttggaatcccctgaactgtgcctttgtctgactttgatctcttggctccaaagtcttcaaagctatccttgacttttgcctgagatccgagtctgctggggcctggcctctgattctgatggagcccatgctttcagatgcggagaaacaaaaatgctacactttgggttttgttttcctttctcagcaacttgtgttcaattcagtgaccaattgcttggggccgcgcaaatttctgcacagtgggaagctctacaaggccaagagcaacaaggagctgtatggcttccttttcaacgacttcctcctgctgactcagatcacgaagcctttggggtcttctggcaccgacaaagtcttcagccccaaatcaaacctgcagtataaaatgtataaaacagtaagttggattctagattttgcattatcagggttgacgtgtttggggaggaagaagtttccaaaaaggaggtagagttttagcagggtcaggggctgtggcatgcaggagaaggccaggagttgaaatgcgatttagggtgtccggagtggaggacgatccatatcccgccgcagtgtcagtgacactcagtgctatcggtggaacatattggctgccaaatggctgctgtggtcccctgggatgtgacagaggcatgctttagcctgtaggagcgaagtctagggtacagatgaggcaggtgtgaaaaagctcgggagaagaggtgcaaaacagcacccagggcccaccgtcgcctccaaacagtcctaagtcccctgccagacttctccaggtagcttgaaacatccgagccccctcctttctagcaaagtctctctaaacagttgatacgtggagaatttccctcagctgtttatatggtctgctcatacgtgcatggctgtgtttgtgtgtctttgtgtcacgggacgttgtttttctaaatttgtctgcatgggggtgtttttacagaagaattttctctgaggcagcagttagctttattatgggaaaaaaaagagctatgtagttatatagttactagaaacttcatgtgaaaatctttggagggaattgcttgatgtaaagtggatgaaaactgctgtttagaatacaccaggaaaagcgacaccagccagatcttattctgaaagacttaaaacatacccgcaaaatcgtgggcgggggaacccatatttatcatatttataatttgtaatatgtaaaagttgatgctaacccaaaattattattctgggattctttactggaaaacacacacgcccttagtctggtttactggaacacacccagaaacacacacacatgctcagtctaggttactgaaacacacgcacgagtgtgcacacacgcgctgacttgcagtctcgtttactagaacacattggcataagtgtgctcacacactcacggtttaccggagcacacagacccccagcctcgctttgtaatgcctgtgtgttactttccagcctattttcctaaatgaggttctagtaaaattacccaccgacccttctggagacgagcccatcttccacatctcccacattgaccgcgtctatactctccgagcagaaagcataaatgaaaggtgagacctgccgcctccccagcatgggccccagggctccacggctctaggacacacaaggggcgggtgattaatcaggtgccaatgtttcccaagtggcaatgccatcacccctagctgggagtggggatggggctattacttttttctacagcctctcaaaaatctgtcacatggcatgccctttccaaaataacatggattcaaactaattttgcttgagtttttttttttttttttttttttaaggcagagtctcactctgtcacccaggctggagtgcagtagtgcagtcacagctcactgcagccttaacctcctgggctcaggtaatcctcccaccctagcctcccaggtatgtgggactacaggcatgtgctaccaagcctggctaattctttatatttttttgtagagatgggttcttgccatgttgcccaggctggtcttaaactcctgggctcaagggatccacccgccttggcctcccagaatgccagaattctgggattacaggggtgagccactgcacctggcattgttgttgttgttgttgttgttttattaagaaatgtttcgcattctttgaggtaaacagagcatctcaggtttcccctggcttcccaggtggcagaaaccaataggaaagtaatttcggggttaataggaccacgcaaacccaaacctctcctcaccttggctgacttaaatgggcattctggaacctagggctgtgggtattttgcttcaatctgtcttcaagacactgccctggagccaaatgaaatagatcattttctgaagggtgaacttgacacaaggccagcatcattccaaagagcatttgcaccaagcaagaaaattggctaaagcttttgtgcatatggttctcagaaaaaatgaaggagaaaaccgcggccacaaatgccttcccccaaggcgttttggtctttcgtgtgaagtggttcccaatctgggaagtggtttttgttctttctttgcgtgatttcataagcgagatccttctggctttgttggattaggcaaatatgtgctgctcttcggtaaggaaggaagaggagtcgtgtcccgatgttgcctccaagacagcatctatcacagattttcttccccggggacatcatcgcaggtcttgaggacatccatggaaatggccctcatgcctttcttatcgatggcaggaataagtattagcgtcacgtgacataaaatcagattttctttcccgagcctttgttgttaaaatcaaatgaacaaagaaacagagtcctggcaacagtgtttgaacagacctgaagcctttttcctgagtttctgtttggcaactttctgtctttttctgtccaaggactgcctgggtgcagaaaatcaaagctgcttctgaactctacatagagactgagaaaaagaagcgcgagaaagcgtacctgggtaatgcatggccccgcggggtgtcctgcacagctgggcaggagggagggccatttggctgggctgaaaatcctcagaatagaagaatcccctggacctagaggaggggcatggaatgagatggaagtgagcttggggtgggatgcagatggggatggagggcaaattccaggagcaaggaagcaagtgtttaaggagagggaagaattacttttgagtcgggagaggtacatgaaatgcattgtgaggctcacagagatgggaaaggtgtggcacgttcaaatgaagcattttgtgtttttcctgccgtcatagtccgttcccaaagggcaacaggcattggaaggttgatggtgaacgtggttgaaggcatcgagttgaaaccctgtcggtcacatggtaaggctgtgaggcgcccccggctcctgctttggggttgggagtagggtccgggttccccacacccccacctggctctagatcaaatgtgctatttccatactccctgatctccttccagaattggtttaactagcacttgttaaaaacctggaggttttgtgtttttttttccatcctttctaccattctgcttctccgagggatctgagtggctgcattcacagtggatgtgacacaagatcaggccaaagtaacgagacaggaagggcctagtttcaaagcccactcaattaagtatttgtttttagtttaaggatgaagctgacttctgggagtttccacccggattctccaccgaatgacacttattaagcatagcagttattaagagtggggagcggccgggcatggtggctcacacctgtaatcccagtgctttgggaggccaaagcaggtggatcacctgaggtcaggagtttgagaccagcctggccaacatggtgaaagcccgtctttactaaaaatataaaaaattagccaggcatgggggcagccacctgtaataccagctattcattcaggagactgaggcaggagaatcacttgagctcaggaggtggaggttgcaatgagctgagatcataccactgcactgcagcctgggcgacagagcaagaatccatctaaaaaaaaaaaaaaaaaagagtggagatcaaaatgaggtgtgagttccacctggcgaaggcttttgttccctccaggaaagagcaacccgtactgtgaggtgaccatgggttcccagtgccacatcaccaagacgatccaggacactctgaaccccaagtggaattccaactgccagttcttcatccgagacctggagcaggaagtcctctgcatcactgtgttcgagagggaccagttctcaccagatggtgagtggaacgcggccctgtggttattcctccttccctggcactcgtttgcgtgggttaatgttttcttacctggggacttggtgccaggattccttcggtttccctcctgagagatgaggctggctggcacaagacgaggctctgtctcccctggaggagtcttctggaggcgtctcattgcatgtggacagagcatgcttggtctagaattgtgccagctgccctgggcaaacacgtccatcttctgctttccaaagcaggtgactgtggagaggggtgtgtttaagagcctcagcatagttcttcagtccttggcaaaaagctgtgctggcaatggatgaaactggccaatggaacaaggatgttagcccacaacaggagccgcagaatgggccaggtccctttgggtggcatttttgtaccacttattaagtaggcaaagggatgcagtcatgttgaatgaatcatttcttcagccagccttctgtttctgcttgggcctggaaaagaatagtctcagcccaatgattccaagaaactacctgtctctccctcaacccaataaaaatcaccggtgggcatggtgctgcaggcctggaatcccaacactttgggaggctgaggcaggaggatcgcttaagcccaggagtctaagaccagcctgggcaacatagtgggaccttgtctctacaaaaaaatacaaaacttagccaggcatggtggcatgcacctgtagttccagctactcgggaggctgaggcaggaggattgcttgagcctgggaggtcgaggctgcagtgagccatgatggtaccactatattccagcctgggcaacagagcaagatcctgtctccaaaaaaaaaaaaatcacagagtaagttaaaagattatggtctcaacttaattataaccgaagaagtgagggtcaaatgctagcattatctgtacaaggtttaaatggctccatatggccttcatcttttagtactttttatatgaattatctcattgtgagttaggtactcgttgtggtagctggttaaatgtttgagtgtgactggaacagtttggctcccaagtctgggctcttaactactatgtgtactgtcaacttctaattcttttttctttttattttttttatttatttatcttttttcttgttgttctcgctctgtcactcaggctggagcacagtggtgcaatcacagctcactgcagcctccacctcccaggctcaagcaatcctcctgcctcagcctcctaagtagcagggatgacaggcatgaaccaccatgctaggctaatttttaaaaattttttgtagagacagggtctcactctattgcccaggctggtgtcaaactcctggactcaagtgatcctcctgcctcggcctcccaaagtgctgggattacagacgcgagccactgtgcccggccaccttctaattctgagagataaaggttggggttgggtttttttttttatttaagtaatgaaataccatgacacattggcaactccgctggggagcgagttggaaatcctagtgttggtttacatcagagcccagagaagaagggagagcataacagttcatcagggggtccccaatatgccagacatgtgcctcgaagagagggaatggtccctcttaggagggtctgtttgttctcttttcagattttttgggtcggacggagatccgtgtggcggacatcaagaaagaccagggctccaaaggtccagttacgaagtgtcttctgctgcacgaagtccccacgggagagattgtggtccgcttggacctgcagttgtttgatgagccgtaggcagcgggctcagggtgtgctcagcagggtcccagcccacggccacacatgctgtctggaaattgtattccttttctaagaaaccaccatttggtattcagtcacagggatatgggatggcaaagacaggcccctcaaagctcctaggaatcattctcgacaatcctccctgccccgaaacaatttcctgtttcatgaaacaaagctgtgttttcctttgtcctcactacaggtctcattatggcttctagggtcgctgaaatcccatagccctcaacagggtgcagctgggagtctagccccttcccgggcttgagggatgggtctggttactataaaatagatttataaatgcaatgtctatatttttggagaactcatgtaaccctcctgtttcttacatccaccagtccccaagtagacttcttggcctacaatgcccagtccttggtgtgagtttagaaacaattatgacggtcctgtcattgcttcagaatcccatctctcctgcagggaaatgctgcctagagctgatcactcggtgagacggtctgatcaggccctggcttagctctttgaagagctggtctatggaagtttccagcatgtgcaccgttatagccgttccttccccctctaggccttgtattaatatatgtcaatgaaaacacactggtgtattgttgcgtggattcagttctgattcccagcatgcttagaatatggtcacagaaagtcattatctagaaagtcacccctctgctggatcagatcactacaggtcactggaaaggcaactttacaatgttgggtcactgggtctcggttggcagccatgttggaaaaatctcttttggctcggaggcctgtgatatttcatagcagcagtcgttgctggtgacctgttctgtgcttgaatgtgctgaatcctgattgttgtaggacatttcaacagctctttttggtacgttccccaaaaagccatgtcctagatccccaaggcgtgaaaaggaaaaatatcaagctggaggttgggaaagaaaatgaaggcagtccattatgtggtgggtgaaagaccctaggaggatgcaagccccgcacatcccggggcaaagacctaagacacttttccaccctccaccaccccaacctcacataatatgcttgttgcaagagtcaggactttatgactatgtgccaagctgtttggtttgagttctttaatttttttttcccttaaatgccaggagatcatctggttagttagatagtaacttgatttgctaatgaaaagtgggggccgtgttttgtttgcatgttaatattctcataatcctagtttgttgtggtcatgaaatgtcctttgcatgttctgttggtactggagtctagctttcctgtactagatggtgttctctttgattgtaggtccttagactttaattagggttatcaaagtgctttctaaatgatagcatcagcgttgtggcagagtacctcctttgctgggaactgaatgtgtagtgttatcatttcccatgagagcccggtcatacttcaagcaatttttttaaaagtgtgtgttggaaaggacaacaaagtttacatttcatacttttaagaaatactttattatttatttattgaagatagtgtagaattttgtatcaagaacaacagacataagtattttttgaaacaagcaaatataccctgtagttagaaactttcaactgaacatgttagagaccaagtttaacttcaggcatgcatttgtttaccatttcccagcagaaaacatggttaaaatactttaagtttatattttttgatgttgttaagaaacttttaaattaaatctataaatagacatgcaactcatgctttcctatttctataaccaacaccgtttgtttagtgtatttatgaaagatatgctaccatggtagaaagaaaagtattcaatgtgtaaatggggtagtgtgggtcaccattccgatctctttttgttttctgtcctgtcttttcttcattgactttatttgcgtgttaatgttggacatcattgttcatgtaggtagcgtatggtatgcacaatgacaaacaatcgttttaggtcccaggtcacccactcatagtgtcctattattggaattaatgtagcatgagaaagcaatatgtgactctttttcctcaagtgactctgttgagcatccttgagatgctcctgccatgtagcaagttctggattagtgtccttgtatttactggtgtaatttgtaatgtaaccaattgtccgtatggaggagtcgggctggccctcggacccagctgtgattcatgagttgtgtcacagggattgagaaacatgggtgatgcatggagtctcaaaccattgggcctctctgttccttcacctctaccttcttgaccacctgggctatatttcatagaaattaaatgctccttgccaacaaggagtctgtctcctagctctttgttttctaaatataggagttctctaggccactgcatcccggcatcctgatcccagccttttagacacccctgcaagcgttcctctgctctgagccacactgctagcttctcctgcacactctgatctcctttagcccaagaaggggctgtgctggtcatagggttatgctgtaaccctcagtcttccctgagaactgaactatcctgggacctcttgggctgagccttcttcacagagcagttctctagaaggcagagtccacatcctggtccctctggggcagggcctgtctggctgctggcatcaccctggcaggtggatggacagcatcatctcctggaaccaggtttgctgtgaccatgagagcctgaagatgtggctcattcggatccaggcctggactaatctggaaagagggactttctaggtgcaggtcaccagggatgcttgagaaactagagccagacttccttgtttgtttggataatatgtccctgtcctctgatagcagaggaaagagctctgctcccaaagaacattcatgtaagaggaggcatttttttcttctttgctttttttaaacaacctaaagtatgacctaagtgtatgaaactaactgatttctttgggtagagtagccctgaatttaactggggaaaaaatcccatcagactatgagtaaattgaccacccacattaagtcttatctcggtgacctggtaccaaagcccaggtgtcctccaggggagtattctggggtggcagggggattaggtgctagcgccagcagggaaggacacttgcaggtctgccttccaaggctaagcaggccggctgtctctccaggaactggctaggacaagtgtaaagccactgaccacacagaaccaggatgttctagaatctgatggggctgaagatgaagggagaaatggacaaggcacttctggctttattgaaaaggtgaagctcttggagtatattttagagtaggccagtaccttgtataagcagaaaaagacttctctatctccactccaagtcgtttttttctagttgattgggcctttttgattgataagaagaaaatgtgttttgtacgtgtaacaactttaagaatttccattggaaacaaagtatgatttgatttgatttgatttctaagttctcccttccttttcaaggttagcgatgtgctttatagcagacactagcacttttacatgaatacctggtgtgctttggatgtaacagggtcattttgggctcgaggtgagtgtgcaattagcagcaggtctgcttggtccagatatgcttgtttacaagtttagagcatcctatgccagaaagtgagatgaaaacaaaggcacctggattgctttgttttgcttttagataaaagagctttagctcacaccaggcagaagcataaccagtagccccagaaaccggtagcatgatgaagccctcagacagtatagtctgagccaccataagaggcattagggaaaactaacacctccttctttttgcaccgtggggtgctgaaattcctgctagagacttccccttacttccatgaatggcccaggggctgcttagtatatcattagaatgttcattctcctccttttccctggagtggaccagtgagaccaaatgcttgtgtttctctatgttttcagttcatttgttcaaatgacccagaagatgaatccatttctgggaaggctgagctcagatgaggattgctaggccagcctaggttctggggcggatctcagggacagaaacaggcttgtattaagtatgagtggcaggtacttctctagaacagccctaacctgcactagtgaggggggctcaggaattcccatgacattgatctagcagcctcctgcacgtagacactcagttcattttagggacgttcaatgcttgatcaaatggggggcattttctttctttctttttttccccagctacagtgtaattgcctacctgcctgggccccttctagaggaaggtgggctttccttgtccgtcaggctgcactcatgaggtgatatcgtaaagcagcagaaagactgagggtgcaaagaaaccacagctgccattcacggggcagctccctctagctcttctgcccagtgaccttacaggctttagaggagcctgatgagagctatcctgggggccaagggatgcattccctgcagcttcctcctgggggacccacaggtcagcccattccaggagaagcagtcttaggcccgtttgcatcccctgccactgccatgtgcctgccagcccggtttctgatgaagacgtggctcagtccctgctctccttgtcgcagtggcttgtacttcatgtgcagtagcccagggcccgccttctagagtgaatgtttccctcgagcccttggatatttttattctattttgaatggttccgatcaattaatgttgctttgtgtggggttcttcagagaaataatgcaaaccggccaggtgcggtggctcacacctgtaatcccaacactttgaggggctgaggcaggtggatcacctgaggtcaggagttcgagaacagcctggccaacgtggcgaaaccttgtctctactaaaaatacaaaaattagccaggggtggtggcaggcacctgtaatcccagctactcaggaggctgaggcaggagaatcactcgaacctgggaggcggaggttgcagtgagccgagatcacgccactgcactccagcctgggtaacagagcgagagtccttctcaaaacaaacaaaaaaagagctaatgcagacctcttctggttagacctgacacggaggaagtaattggctggtcaacttaatggcgccccacagcttcctctggatcctgcttctttgtacttggaacacagtttatttgagctagaggaaaggaaagttctagaattcctgtttcctcagcctgcactgtatcagatccaggatatgtctgcatttcatcaggatcaagtaagatacataaccttatatctgtaggagccagaaaaaaaaaaatctattcctgataggcatggaaacttagtccacatgaaagacagaagacatctaacagctgtctgtcttgggagcattaaaacccagacaccaagacacactagacagtccatctctgggttgtgatctctcagaaacatcttagtagttaatgcactgttcatttagggagtccccatcctggtccaggccaccctcctagaagctgggcggcagctggacgggcctgccttggtggcattcaagcaagcctaattggattaggttggtgcaaaagtgattgcggtttttgccattgcttttgatggcaaactaactttaagtcattaaaataagacccaacgcttataaaagagttcatatccacctcccaataacttctttagttccatgcagcctcaatcagttcctccattcaaaggaaccctctttaccctggccctgggggagccatattacacccacatcataatttttctgacactatgtgtgcttgtcaaatttcagggtcagtttccccttattggatgtcaggggtgttttgtgagttgtgttttaataggattctgttcgattttctataccagcctatattgttactatcatctgcctagtatgaatattttagtattcaaagcccaccagataaagctgtgttcagaagtggactttttggtcagccttgaaaaaaaaaaaatcagcatttctctgatatttcctgaggattaaccagaaactaaggtttctttttaggcagtggtaagaatgcgtattttcttcttccagaagttctggttttatacttttatcttttgaaagaataacattcctgtgcgactctgcttctcttcgcttttgcatttctcttttttaactcaaatctcttatttcctgccgttcctgtatctaaacagaatgggggcctcaggcagacaggaaccaaagaaagggtgtagtggctttgcagcgttgggtgagcagcagccgctgccattctgtgcactgtcaccggcgggggtggagggtctccctgtaggaggaggaaactcgctgttttcactggcagatttcaaggtgccggctccacctaccgcagctgctaggcattgctcttgtgtagatcgcagaaggagttattggtgatgtggggtgtaggggaagacaggaaaacggactcagagctaggaatgtgggcctggcagagaccgaaggctgggtgggaaggaagctcgcggcgagcctagggttcaagcctagcgcgccaggggtctccagtgagaccttgctcttccctgccgctgaggctggggctgcacggaggtcctcaggcttcccaccctttctgcatcagctttagtgtctgtcggctgggtggactgcagggcaggtgacctggaggaggccctgctccccagcaagcgttctaggagttacggtgtgctctattgggattggattacagtctctacttgtagactttgacttctggaattttaggtggaagggaatttttgttggtgggacgcagcagctcagtgcgtggtgtgtgcatgcgtgtttgtgcgtgcgtgtgcatgtatgtgtttgtgcgtgcacgtgtgcgtgtgtgtgcatgggtttgcgtgcatgcatgtgtgtgcgtgcgcgtgtttgtgtgtgcatgtgtgtgtgtctacgtgtgtgtgcacgcatgtgtgtgcgtgtatgtgtgcgtgtgtgcatgtttgtgagtgcatgtgtttgtgcgtgtgtgcgtatttgtgtgtgtgcgtgtgtgtgcgtgtgtatgtgcgtgtatgcatgtgcatgtttgtgtgtgcgtgcatatgtgtatgtgtgtgcgcgtgcgtgtgcgtgcatgtgtgcgcatgcgtgtgtacctacccacacctagggggatgcatggctctgtgccttggagagggaaacaggaaatacgttgctccacagtcctgtcatcctggtcaggactagtcgcgtggtttgcggacagagtgcaaaatgaaaatgcgaggccccttgttcaggtgatgaagcatttctagacagtgagaggagagcattaagccaagctcaggtcccttctgagtgcatagccccttgtggctgccaggcagcacacccaggaggccggccctgaccacactgttctctgctggttcccgaagctgatgggctctgtcttaggtcttcttactttgaaaggtctcccggcaggctgtggcaagctgcgcggatacacttttctaaacgtctgcatttatttcctaaaagcacaaatggcctggactagctagtgggtgtggaaccgagcccctagttcacagctgtaccccaaggctggagagggggttgccggtggtggcaggagctctgggctcccagttcaggatgggccacagggcgtcaagcagctgtgagcctttaccattgagctcactgcttggaaataaaacccttcctctgggccttgggcatccactgggagcttttctcccctttcctgggaggacagcaagccttttccaaccttctgccttcaaagagaagcagggtcatagaagtgctcagtgtcccttccccagtggctggacacttgctcctccagccttcaccccctggagagaaggggagtctgcggagccagtgcctccctgcccagctgggccacacgatctggtctgcgggtgtctgggaggaacctgcttcggagaggctgcgacctcccagctagactctccccttaggatcccatgtatggggatggtaggagagaaaagatccctctgtgtaagtagcctcaagttctagaagaccatggccccgggaggcagctgaccatgaagctgggcttcctgttgttgctttctttcacgagcttttacttttcctgggctggacgctccaaaatgtttgcagttccatttgctttttgcaagtaggtccccatctccatatacattgagcaataatcctcactatgtttcctgattctgtctgggattatatttgctaagtaaaaatgttgacagaaattgcaaactcatctcacctggatttgattgagtcaccttgaatgacataacaaattatggctttgttttcatgcgtcatgcaatcttccggactacgggaagttctgcaagtgttctccaggggcatttcattaatagcgtgtcagcattagttttaatgaatgaacatttgaggtacattctataaatcaatatccttaaaatgtcatctgctaaacattcactgtgacagaaagtagatattttagcaagatctatgttaatgctacttaattttagacatgcatttaaagcctacatggccaatagcccaagtatctttgaactgtgaaatcaacctcagatctcatctgctgtagccccgcaagccggagtctgtgccctccatgacccttcttatcccttggtggccctgcatagataggggagttggcccctgcccaccccgtgttgtattgccttagctccatcagctttgtaccctcacacgtataggtggtgaacttatgtgtaaatacatgtgtacagatgagaaactgcaacaaaaatgtcctgtggatgataatcagctcagtttccggttttctacattctgtgctgtttccagctaagaaaaaggcgaactcccactatataaagggaaaaggttgtattcatttcatgttcctcatgaaatctctgctgtatgtttatggaatggccatgactaaatgtatatatggtatgtaagaggccatgctgttaaatgttgcataaactaacacagattctgtagtcaaaaatatttaacttgttattgtaaaatgtgatttgtcattgagagattatttttctgtatgtatatgagagtattttaggaatctaatttaagtgcataaaactatagaaaaaaatttaaaacctattccaagagtagaaaatgcttaatgagattacttgggttcaactcaactaaatttcttatattaaaaaaaaattccaagttgtatatgttagaaatcaaatgagtcattttttttcctgcaggaaatatgataaatttcagtgtaatggatggtggcgtgatcaaatgaaaagtatcctgtagctatgacctcgcatgggaccttggtgttgcattaaaaatggatttttgcagatcacatatctgagagggtacttgtgtcaggaaggatgagaggatagggagcctgtttttcatcagatccatgtgccacgcaggcttccttgggttctagtggatttgttagggatctggggctgacgcagctatcccactagagaggccactctctgacttccaggtcgccctttctacttctgtatctggattgattcagtttatccctaattagcgtttgcgttttccatgaaatttcctgatgcatcctcactgtcttcaactgttgcatagccaggtgggtggatggatggtttagggtttctgagttaagccgttttggggcaggcttctggatgcccatgtttccatggagaccccagggggaagatgccttcctcccgtctgcattcccagaaaaggatcagaagtccaggctgcttctggggcacagactttctgtacttggccaccagaagtgccccttaggccacctaaggaggattctgtgaaactcaatgtctaaacccctgagaaaggcattcagaaatgatttcaggagggggcaaccccaggagtccagcctcccctggcagcctggaaatactgcagtaacaaaaagagctggtttctggtgatctgaatgcattgtgtttgggggtgacaccgctggtggaaggttgagggcctgtggtctgaaaagacatctgaagaatgtgttaggttttcaacatttctttgaacaggctgcgtgcatcttaatgctgtcaaccagcaactggagccccttttttgagaggcccgaaccagtaaagctgctgacttcaggagtatgggaagctgtgatttctggaagcttcctggaatctatttaggtgcatgaataatctgcaaatcacttagaggcactgtccatgtggtccataactggctttattcccaaagatggagctgttcagagatttctttgttcaggcgcagccttggaaggccacctaaggcctgccagcagaggagatgagctctggtctaccaaccccaaacaggccctgactctccttccttagaacgatgccctctggctggggtggcaagagggctgtgagtggaaacaagtcagccagtcaactgtcccttgggccttggttgtttcaaaaaagtctggggacaagaaaagctagaacatggggccctcccttcccaggagtgctagcgaaccctcccagatagcctttgcctgtttggaaaagaatgtaatccatcagaacgtgagctccttgtgcttccagtgacaagcgggccacagtgctggtggcatgttgcttccctcacagccctgcccaggggtaggaccaggcccgccccttgatggatgtgctgttgattgtaatatacttctgttgccaaataatggtactgtttaattttccataaaagagagactatattgtctgatatgtaatgttaatggaattctaagaattactagacactattataaattgtagacttacgtatttgtctaaaggtttgatgaagcagggccaaaacattgtttcttcttttttgtttgaaagaagctgaggtttgtttttgctgtttgagtgttcctttggcaacttattatgtgtgaaatgttaaattttaccgattaagatgatggtaactgagacctttctttaaaccagtagcaacatcagtacaaattgctcttcctgtgtatcttgaacctaaaaagaacaatctcttcaaaaacaaaaacaaaaacaaaaaacaactctttggtcattttgacctgtgtggtttaaattcaaatagttcatgaataaaaggagaaaagccaatctgttatagtggattattttgggttctttctgcttcactcttttctgagagcacaggaagctaacagccctgcaaatggtgtctcttcctcttcccacagataagattgtagctgtgcaaggaaaattgtgcagaaataaacctagaaaacaaaaccaaccaacaaccctttcagctgtcctgcggcttcagataaatgttagctaacaccaagcagaaatagatttctgtgtacgaagtctttgtgagaacaggagaagttttgtgttgtacagcataagaaattctgagggtggggttgagagggcggtgcaaaaagctgattttcttataaagacattcagaagggtcgctgaatttccaggaagaagtttctaacacacgtaactccacgtgttcagcacttgggtgatctataattctgcgttccataaaacccaacgctgaattgtattaggttgtttcctcctgttctggttttaaggccattcctacctatttcatcactgatttaactgactataaataagtcctttaaattctctagctggcttggacactagttgaattgtgacatagcacatttttaaaaagttgaccctacagcagtatgtctttgcctttttaaaactagtatgccccatttttgaagaacataaaatcgtatgcccttttcttggttgttatttgaagttttaaaaataagttaaggctggatgtggtggctcacacctgtaatcccagtgctttgggaggctgaggcaggaggattgcttgcatccagaagttcaagaccagcctgagcaacatagtgagaccttgtctttacaaaaaataaatcagccaggcatggtggcacatgctcatggtcccgggtatttgggaggctgaggcaggaggatctcttgagtccaggaggccaaggctgcagtgagccatgattgtgccactgcactccagtctgggtgacagagtgagaccctgtcttaaaaataaaaagttaaatgccattaaaaacaaatgcaataattaactttcccaactatacctagttctctccaagtctgatgagggccccctcacacagaccagagagtggatggaatcactagtacaaaacatgtaattattacctatttaaccacggttagtagccagcataatcaaggcaatactttttattctcaaatatttagtttttcttcttgttacagaagtaatacttgttaatgcagaaaattcagcaaggaaagaaaaacacaaaggaaataaaatcacttaatggagatgttcttctacacaaaaataaaggttttgatgcacttcatttctgtattttttgtgtgtgtgtgcattttaaatactcttgtactatttatttatttatgagacggagtcttgctcttgtcaccctggctgcgctcggcctcttgtactatttaatagctaatatgcatcgaaaatatcccatatacaagggactgtaaaactttcaccttgattttaaaaaaatactgtgaagaaaatcattgtaggctgggtgtggtggctcaagcctataatcccagcactttgggaggctgaggccagtgatcacttgagcccaggagtttaaagccagcctgagcatcatggcaagatcctgtctctactataaatatgaaaactagctgggtgtggtcgcactgcctctagtttcactgcctgtagtttcagctgaggtgggaggatggtttgagcccaggaggttgaggttgcagtgagccatggtcgtgccactgcactccagcctgagtgatggcgtgagactgtctcaaaaaacaaaacaaatcattgtacatagatctctaggttctctctggtgacctcgtaaggcgacatatgaagggcctcatcattccccaagattgtatgtgcttgatcaacaggaagcttgctgagtttgactctgaaggatctgggcagcatcagcagcatgaggctcccgcaaagacggtttgtccattggcagtcacatgtctgtaggagctgtgattgtgtgtatgacgccaccttctgcagagcaggcctcactgcaggcaggaggcaggcagtgagtctgggggaacctggaatgtggtcatggttaggttgcagactcagctgcggagacagaactcaatatcccgtggctttgaagagaggtctatttcttcatcgtgtttaacagcccaggggcagcagtaaggcttggcagggtggctctgcccttggcatcgcttgccatcttgtctgcatctagctagagggatggactaaggattgctcaagagggcagtccaggaaggcacacctcgcttcctctcctttcccatttgccagaactcagcaccaaggtcaggtgctgccagaggctcaagaatgtggtctctagctgagtagccctaggcccacctaaaaggtggctgaatggtcttcgggccagccagcagcctcagcactcctggttcctggaaaggttgaggggcctcagcactcctggttcctggaaaggttgaggggcctcagcactcctggttcctggaaaggctgaggggccacgtggtgtctccgttggttgtcacattaggtgatcatgtattaaaagctttgccaggaggaagctggagttgaagccaagcatgagtgtcaggagtgttgtgccacatggagggcacgccagtcccagcactagcacatagggagcagcgctgggccatgtcattgctctgtaggacttctttgctgcaatggtcctgcctctgcccaaccaggggtggttctgggaagggaactggtttgttggccaaaagttcttggaggttgactaaggaacaggcacctgagcgggctgttgcgtggggaactctgtaactattttctctagaagaccaaaaggtaaaatgtagtggaagagctgacctgggaactggttttggttaaaaggtgaattgggagcatcttagggacaaagcgggaaggggcaggggacctacctaaggtaacttttgcccgtttgctccagcaacgtgtcggcgcatggtgttagttatacagtggtaaaaacatgggctgtagggcctgacaccagctgtccagacaggtgactctgagcacatctctagggcccctcaatctctttcctcatttgtaaagtggggtgatgtctctcccacccgtgtgacaaggctgtcatgcagcttcagatgtacatgaaatggccttgaaagctacagagcagcctacaactaggtgtgttcatgttaggatcaagggcaagaggcctccctggagggctatggatcaaacacagatccgatgatctagtagggaccaggaactctgaacaaacccttaaagacacgggattttggcaggcaggaccagatagactttgctgagtgaccatgtgttaggtgctgtgtctaaccaattaattcctaaacataatctactcaaaccaaattctctaggccaaaagggctttttggcctttatactcaggggataccaaaaaaggacataaaaataaagccttctacattccagtttaaaagacagtgaacataatatgatctgttctggaagctttttattgttgctccaagtttaagaattttcactgatggcagaaaaccaacacttttagacaatctcccgcatagccctgcccagcttctgaatcttggtcttgacagacatgtcaacatatttctcgccaatgcgcacaatcattccacccaagattgacggatcagtctacaaaagaagtaagactggaaatgtgaaaacgcgctaatcaaatgggacacacaaaaaagtgttttgaaaggctaaatgtgttgcacaaatgtaagaggttataattacacctagaaaaaggcaaaagtaaaactgcacagtcagataatcatttaaatttaaaataaatacaaaattttaactacagaaaaattagtatagagttagatctaatatttcactagtactttctgtagccattttaagcttaaaataacccgagaaaacgtaccataaataatttaaaacctaccttagcctccaatttcaatacttggccttgacttaggaagctcttgaggacagtttttaattcagagagtgtggcttcttctaaaggctgaaaggcaaaaccatcctttcaatttagataaagcaaaacagaaacttccagagttaaaataccccaggcccacatcaccaagacaggccttgtgagctcctccctttgctacctgggcccatcatggagctgctctgcagcattcactccttgttcacgctggaggttcagggagcacaggaaggccctgcctcacagcatcacccgggcagctcccactcagccgttcaaggacggcctgtaaatgccactccctccctgcctctgctctgtgtgctagcagtacaacttggaactaacaaggaaaggccttcaagtttctaatgcctgaagatgcagccccatcaatgcaggaggacacaggcctctcctgggtgcagccctggggacacgacatgcatctatcatgtccttggctgaaaagttgccattttaacctggttttacatcttcatgtttgcctagctctgctggctgttcatctccccgcatccacagctacctggagctctggcaggccactccactctctgaaccccagtgagagaacctggagcagttggcttttcctgaagtcagctcagctccataacctactttagagcaagcacctcaaatgtccagactgcactctcctctcggccccaactcttactcctggttagttatgttatagtgttaagtgttctaatggtgaaaatgaagaaggctgttaaaccaaaggccttttttttgagaccgagtctcgctctgtcacccaggctggagtagagtggcgagatctcggcttactgtagcctccgcctcccaggttcaagtgattctcctgcctcagcttcccaagtagctggaattacaggcgcatgccatcacacccggctaatttttgtatttttagtagagacggggtttcaccatgctggtcagactggtctcgaactcctggccttgagtgatccacccgctgcagtctcccaaaatgctggggttacaagtgtgagccaccacaccctgctaaaaaggcctttttttaacttgtcataaatcctacctccctggcccctcctctaagagcctaaaaaaatttggcagaaaaatttatgtctttgtaaagatataacaatatcctttttttgggggtggggggtgctggtggtggccagaatctattcgtgttcaaaacatgatttactgagactaaaaggttacagaattctgaaatatacataccctccactgagacatgtaccaactgccaggtacctgtctatgccaggcacatttcatgcctactatctcccttcatgtgggcaaccctgaaaggccaccggtcattatgcccattttacatatgagggaacggaggctcagggtgggtaagaaactcacctaaggccacatcagcaggtgaggaccagccccaatatttgaaaccagtctgtgtatttctaaagcctgtgctcttagtcactcatcaagacataacgtttttcaaacagtacagactcacgcacccaacagtatcaacatcaaaagcattagtaacagttggttctaaaatcttttgcaaaaacaagcatcctttaaaagaaaatcatggccttgtggctgtgcacggtggctcacacctgtggtcccagcacattgggaggccaaggtgggtggattggctgaagtcaggagttcgagaccagcctggccaacatggtgaaactccatctctactaaaaatacactaaattagccgggtgtggtggcaggtgctgtagtccagctacttgggaggctgaggcaggagaattgcttgaacctgggaggcggaagttgcagtgagctaagatcgtgccactgcactccagcctgggtgacagagtgagactcagtctcaaaaaagaaaaaaaaaaaaaaaaaaaagaaaatcatgtccttgtgttcactgaagaatggcctgcaccagtgcttcatgatgggtgaccgtggggcaggtgaatgtctaatctgtgccacactgttagggataactgatgcagccacagagggctccctgcctatgtctgagctgtaatgatttgcagccaggcacatgttttgggggcaccaactactgaactacaaacgtgcaagtaagtatgatgtgctaggatgcctctccttgaatctgtgctaactagaaggttagactgtcctttaaatgctacatctattaatctagatgaggtcaggtgctacgaattccaagtcaatctaccacactcccctgttttcctgtagggtaagctacactacatttgactgagttacatagggaagaaaatacatattgaagacaacaacaaaattaattctagggaggcaatgtagtgtagtctaaggaaaatggacttctaagaggccttgaggcctgtgttcaaattctagtcccacctcgtatgactttgggcaagcgacttcatctccctgcattcggtttcctcatctgtaaaatgaggttaattatacttctatctcacatgaatcttttgatactgaataacataataaagcacccagcatatagtagggttcaataaacggtagccaattatagcccactatcaagtcaaaaagatacaaaggcccaacggctctactccttcccactcaccaccaccaaagatgaaaggttagtaactctagtttcaggccaggtgtggtagcttacacctttattcccagcactttaggaggccaaggcaggtgggtcacttgagcccagaagttcgagacaagcctggagaacacagtaaaacctccatcactataaaaaacacacaaaaattagccgggtgtggtgggggtgcactgtaatcccagctactcaggaagctgaggcaggaggatcacctgagcccaggaggttgaggctacagaggtgtgactgtgtcactgcactctagcctgggtgacaaagtgagactctgtctcaaaaaaataaactctagaattctagtttcaggaaactacttcaagtggtattcataaaataattcaaacatataatagagtctaaaccactcttttccaacacattttgatgtactttacatttaacccaggccttatgaataatcactggttacagaagcactaataagatacacgctggcttttccaaagcaaagggtcacagaagctgatataaaaatgaaacaaacatcccaggtgacaagttacctttcccaatttcttgattttaccctgtttttcccttttcttcctgcaaaaggtgacacatgtaatatcaaggcaaacacagcagcaacaacccgttacttacagatgcagaggtcactgtgcaaggtacctctccgcgatggacactcatcatggtagaaaaggcagaaacgactccttgggtattgcttaatcgaccattttcagcaagcaaatctgccagagtgaaggtgtctcagtaacaagaaactcacctgaacaagttattcatgaagttgtatactcaacccaaaaaacaaacttagatttgtggccttaaaacaccatatacaggggcgcatgcctataatcccaactactggaggctgaggtgcaaagattgcttggggccatgagttcaagaccagccaaaatagtgagatcccatctctacaaaaaaacgttagggcttggtggtgcatgtctatagtcccagctactcaggaggctgaggcaggaagattgcttgagcctaggagtttaaggctgcagtgtgctatgactgtcctactgcaccccagcctgggcgacagagcaagatcttgtctcttaaaatcacagtatattcaatgttctttaacaatgtgaatggaggccaagtgcagtggctcatgcctgtaatcccagcactttggatggccgagatgggcagacagcttgcgtccaggagtaacatgggtgaaaccctgggtaacatggtgaaaccctgcctcacaaaaaaaaaactaaaaaattagctgggcactcaaaaattagtggcgcatgcgcgcagttccagctactcaggaggctgaggcagaaggatcacttaagcccaggaggcagaggttgcagtgagctgagactgtgccactgcactccagcttgggtgacagaaagggacacccaggctcaaaaaaaaaaaaaaaaaaaaagaatggagaagatacaacttgttatttaaaacgcatatccaatttttttttttttaaatagactgcactgacaaggatttaaattagtaggtatggggggttctcagcttgcaatctgattttcatatttatgttacagattgtatgtttggctacaaattcaaagatgatatcatgaacacactttctctgcaacttttattttgagctggctatgaggatctgaaaagcaatccaggctgcatggtggctcatgcctgtaaccccaacactttgggaagccaaagcaggcagatggcttgagcccaggagttcaagaccaggctgggcaacatggagaaaccccatctctacaaaaaatacaaaaaattagctgggtgtggtggcatgcacctgtattcccagctactagggaggctgaggtgggaggatcacctgagtctgggaggttgaggctgcagtgagctgagatcgtgccactgcactccagcctgagtgacagagtaagactctgtctcaaaaagagaaaagcagtccaaatgtacccaagaatgcaaatgtatccaaggatcaaggtatagccacaggccacgaaccattttcttggtaggtatcacactggccgcctccacagttgaaactactgactatacaattagacatgcttaggtcctagtatcctttagacgatgctcctcacacttcaatgtgcaaacgattcacttagggagctggttaagatacagactctgattcagcaggttgctgtgaggcctgagattcttcactgccaacaggctcccaggtgatgctgatgccgcccacagtccatggaccacatttccagtcatagtttcaagacacctcaaatgaaaaagttctaatactcactgatcagattggtagtgaggggagagaacctctcttttgctgtgatgtcatttaggcttttcactttaatggaacgcttcacatagggattcaaaacagaagcagccactttgggttccttcaggatttgctgaaagcatcaaaaaataatttcttaaattttttagagcacaaatgaaggatgtgccatgcacacactttctttctttcttttttggagacaacgtcttgctccgtcgctcaggctggagtgcagtggcgcaatcttggctcacacaacctccacatcccgggttcaagcgattatcctgcctcagcctcccgaatagctgcaccaccatgtcccgctaatttttgtatttttagtagaaacggggtttcgccatgttgaccaggctggtcttaaactcctgacctcgagtgatccacccacctcggcctcccaaagtgctgcgattacaggcatgagccactgtgcccggccatacaaacactttcttatgaattaaatattttatgaattaaattagcactgccgaagaacatatgaaaaaaagattataatcaaacaattttctgactgcctttcagaatacactgtgcactgcaccaggattttatatagaatgatgttcctcaaaaaaatttaaaaatactgtacgaactttcttaaatttgtttttgcttttcaagaaagattataaaacactaaacagccaaaccttcattagactgcatactttaatatatttaagagaggagtcgtctggttttctagcagtgctatttctagagtgcagacctcacaactgtgctctgaccacagaggcctccgcaccgctcccttggaggggccctgcctcttacagagtccagggaacccagcagattctgtgaggcctctggtgctgccagagcggccccaaagagtctgggagacagagtggacaataaaacaggagcacaaccatcatgggaaacaacgttcttctcattttgttgtatcacagtgtctgaattcagtgaccaagtgcagcttccagcatgttgctccagagttccaacaaacgaacagcagtttccagttgagcaccttcagttaacacacctctctatgcttttcaattacgctcctagcacctcctcccaggctcctggccagaatcctgcctctgatccaggatactggtcagatactatcatccaatgctaacatttccacttgagtgaccccacagaaatgacatttttccataaaaaatgcaggaatatacagatttaaagcattctggaatttgggttacctagtttttcatgtttatctgtgtctcctgcatcatccagaggacagtgcgtatccttgtatcatccttccctcttagtgccaaaaccctgctaatattcagtgtcttaaggtaattgcctccctttttctccatgtctcgactgacttccaggctttagacaaactctattctaatatccacaatccaagtaattctctccattgtaaacatgattgtttccgtttaaaatgggcataactgacaagtagcagacaataaccatcacctccaaaaatgcctgtgtgagaccccgtctgttcctgcatgcccttcccccaaatgtctccaacaacagggctgggctcctgggctctgagagaatcataagagtttatcacaccagctaagaccttaagcattatctgcagagataaatggatcaaggaaggaatatggagctaaaattattctgcctgttaagacggaagttccaatagaagctcaagtgaaaaatgaataaaacataaacagtacagaacagtaatacttatagactatacatacgatgattaatatagaacgtaagtattattactctatacaactggcctatgaattgttttttctaaacaataaaaacttgcagatatgtgaattaaagaatgaagaatcttaaaatgaagaaaaaaccaaacttcctctgaagaggctatataccagactgcgtctccctcaccttttttaatgcagaccttactgccagtggtggcgctagaaaatcgaaggaagcaacagaatgtgtagaaacttgttaactagaaaattcggtgaaaacgaaagcagacattctcctattcagttacaatgtaggcttctggtaatacggtttatttattctgcttttcatgtttaaaaaaaaaagtaaaaaacatcttgcagcagcctcacagtctttgcctgtcagtcctctactactactgggaagcccatgcccctttactaactctgctgcccagcgcgccccaccctgttattcttccctcacattttgggaacaaaataattaagaggtttaccaaaacaatgaaaaggtctacatggttacttctggggttctggcaattgcaaaggcatctctaccaaatgaaaacaacctgtaagacatatctgagcctcctctgattctacaagcatagaatatggcaattaaaacctgaggaaaaggtttcatgaaaacaaattctcagtaaaaccaaatcacaatatattctaaacacctagcccataagcataggttttttttttttttttttttttttgagacggagtctcgtaccgtccggggctggagtgcaatggcgcgatctcggctcactgcaacctcggcttcccaggttcaagcaattctgcctcagcctccggagtagctgggattacaggtgttcactaccacgtcccgctaattttttgtattttttagtagagatggggtttcactatgtcagctaggctggtcttgaactcatgacctcctgatctgcctgcctcagcctcccaaagtactgggattacaggcgtgagcactgtgcccagttataagcatagatttttaaaggtagcttttaaattctcttctgaaatagcaattttcctaaattaccatccattttaatcttatatttctaccttttcttagcccctaatcttggttcctaatattaatatccttatatgtatctgtttgttctttttatatgtcttataataaaaacccaatattattactaaaaatgtgtttacagacaatggctttttcccagttttttcttgtaggatacacctcattaggaatgcacaaacaaccaaaggaaaaaatatacaaacaggaacttcatatgtaatgaataggaaagctacttactgctactctcaacaactccttttctacttgctccagcttattctgttttgatgcagcagaataaagagctgtggcatagcgaccttcaataccgtatacctgaacaggaggctttaaaaaaaaggtgaaataggagaggaaagaaaaaggaaaatcagttaatagtatactctcaagagcagaatttaaaatttatattttaaaaaatgtatctctttaacacaaaacagtttaaatatgtcattcaagagctgtcctaaatggcaatttgcaaataaattagcgatgtttccttggtcaggtcactcaatctttgagcctccaattcctcatctgtaaaatgaggggcttagtaggcattgtctaaagtcccttccaggtttacatacctttatcaattacttgtactttaattttgagataagcttatgtttcctttgaactcagtaactatttagtttcaagtatgggaggttgtgaacactgatagacagtttcgagtatgttagagctaggaaaacaggtgtttatgaaacacacaagtatacttttatacatttcatactaacactacacattttcccttacatagcctccctatcgatgttcagtgtaacagagccctttggcagtttacaaaaaaacctgatgcttgaattatttttcacaataaactatagactttttttctaccatcaatgtatgactacatgttcttagtggtgctgtatggttgtagtgggaaagctcaggcttggatgagaaagatttagttccagtccagctctaggactaagctgagtaacctcaggtaaattttcccagggcctcagtttccccttttgtaaaatgggaagaccagttactccttaacactgttatgaagttttaaggtctcacatgaaggacgaaatgattttgatcatttgatttgagatttagggctggtaatgaggacgggacaggataattatcttcctaaattccacctgacgtgggctcattaaggacacagacctggtatgatcatctttcctttacacgatttttccaaggggcggactggctcactgttgatttggtggggaaaagcgtgggtagtatagtctgcccagcacatcttagaaaagttcctgctccttgacagttgaaccaattctctatcacacaggaactttctttaatcaaataaagaatttcaaaataacccatagaaatggaatcagacttcatgttccaacagggttgtttccagctgttagccatgtatcatttcagggggccttctggggaacttcatttattatgtgtcactaatagtcctctttatccggggtcaactggattacttctggtttgaaaagaaagggactggcaactccctgaaatagtgagcctccttggtgcctactggaaagaaagggtgtgaagagtatgaatatttctcaccagaatggaacatggagaactgcattagaaacccaggtaccttgatattttttttttttcgagacagagtcttggtctattgcccaggctggagtgcagtggcatgatctctgctcactacaacctccgcctcccgggctcaagcaattctcctacctcagc
